(19) United States
(12) Patent Application Publication
(10) Pub. No.: US 2016/0032014 A1
(43) Pub. Date: Feb. 4, 2016

(54) HUMAN ANTIGEN BINDING PROTEINS THAT BIND TO PROPROTEIN CONVERTASE SUBTILISIN KEXIN TYPE 9

(71) Applicant: AMGEN INC., Thousand Oaks, CA (US)

(72) Inventors: Mark Leo MICHAELS, Encino, CA (US); Randal R. KETCHEM, Snohomish, WA (US); Derek E. PIPER, Santa Clara, CA (US); Wei YAN, Sammamish, WA (US); Chadwick Terence KING, North Vancouver (CA); Monique LaRae HOWARD, Seattle, WA (US)

(73) Assignee: AMGEN INC., Thousand Oaks, CA (US)

(21) Appl. No.: 14/777,401

(22) PCT Filed: Mar. 14, 2014
(86) PCT No.: PCT/US2014/028339

§ 371 Date: Sep. 15, 2015

Related U.S. Application Data
(60) Provisional application No. 61/799,355, filed on Mar. 15, 2013.

(51) Int. Cl. C07K 16/40

(52) U.S. Cl. CPC C07K 16/40; C07K 2317/92; C07K 2317/565; C07K 2317/24; C07K 2317/21; C07K 2317/622; C07K 2317/14

(57) ABSTRACT

The present invention provides compositions and methods relating to or derived from antigen binding proteins capable of inhibiting PCSK9 binding to LDLR and having increased pH sensitivity, improved binding affinity and/or increased in vivos half life. In embodiments, the antigen binding proteins specifically bind PCSK9 and have increased pH sensitivity, improved binding affinity and/or increased in vivos half life. In some embodiments, an antigen binding protein is a fully human, humanized, or chimeric antibodies, binding fragments and derivatives of such antibodies, and polypeptides that specifically bind PCSK9 Other embodiments provide nucleic acids encoding such antigen binding proteins, and fragments and derivatives thereof, and polypeptides, cells comprising such polynucleotides, methods of making such antigen binding proteins, and fragments and derivatives thereof, and polypeptides, and methods of using such antigen binding proteins, fragments and derivatives thereof, and polypeptides, including methods of treating or diagnosing subjects suffering from hypercholesterolemia and related disorders or conditions.

### FIELD OF THE INVENTION

[0001] The present disclosure relates to nucleic acid molecules encoding antigen binding proteins (APBs) that bind to proprotein convertais subtilisin kexin type 9 (hereinafter “PCSK9”), as well as pharmaceutical compositions comprising antigen binding proteins that bind to PCSK9, including antigen binding proteins that inhibit the binding of PCSK9 to the LDL receptor, and methods for treating metabolic disorders using such nucleic acids, polypeptides, or pharmaceutical compositions. Diagnostic methods using the antigen binding proteins are also provided.

### BACKGROUND

[0002] Proprotein convertase subtilisin kexin type 9 (PCSK9) is a serine protease involved in regulating the levels of the low density lipoprotein receptor (LDLR) protein (Horton et al., 2007; Seidah and Prat, 2007). In vitro experiments have shown that adding PCSK9 to HepG2 cells lowers the levels of cell surface LDLR (Benjannet et al., 2004; Lagace et al., 2006; Maxwell et al., 2005; Park et al., 2004). Experiments with mice have shown that increasing PCSK9 protein levels decreases levels of LDLR protein in the liver (Benjannet et al., 2004; Lagace et al., 2006; Maxwell et al., 2005; Park et al., 2004), while PCSK9 knockout mice have increased levels of LDLR in the liver (Rashid et al., 2005). Additionally, various human PCSK9 mutations that result in either increased or decreased levels of plasma LDL have been identified (Kotowski et al., 2006; Zhao et al., 2006). PCSK9 has been shown to reduce LDL-receptor levels in the liver, resulting in high levels of LDL-cholesterol in the plasma and increased susceptibility to coronary heart disease. (Peterson et al., J Lipid Res. 49(7):1595-9 (2008)). Therefore, it would be highly advantageous to produce a therapeutic antagonist of PCSK9 that inhibits the activity of PCSK9 and the corresponding role PCSK9 plays in various disease conditions.

### SUMMARY

[0003] The invention is in part based on a variety of antibodies to PCSK9. PCSK9 presents as an important and advantageous therapeutic target, and the invention provides antibodies as therapeutic and diagnostic agents for use in targeting pathological conditions associated with expression and/or activity of PCSK9. Accordingly, the invention provides methods, compositions, kits and articles of manufacture related to PCSK9.

[0004] In a further embodiment an isolated anti-PCSK9 antigen binding protein s comprising an immunoglobulin heavy chain variable domain polypeptide, or functional fragment thereof having at least 85%, 90%, 95% sequence identity with or comprises the amino acid sequence of any one of SEQ ID NO: 270 to 353 is provided. In a further embodiment an isolated anti-PCSK9 antigen binding protein of any of the preceding claims comprising an immunoglobulin light chain variable domain polypeptide, or functional fragment thereof having at least 85%, 90%, 95% sequence identity with or comprises the amino acid sequence of any one of SEQ ID NO: 186 to 269 is provided. In a further embodiment, an antigen binding protein of any of the previously described ABPs, wherein the antigen binding protein comprises one or more of: (a) a heavy chain and light chain comprised in any one of the antibodies in (d) and comprising an amino acid sequence according comprised in any one of the antibodies, (b) a heavy and light chain variable domain comprised in any one of the antibodies in (d) or (c) a CDRH1, CDRH2, and CDRH3 and a CDRL1, CDRL2 and CDRL3 comprised in any one of the antibodies listed in (d). is provided wherein (d) is antibodies SS-13406 (8A3HLE-51), SS-13407 (8A3HLE-112), SS-14888 (P2C6-HLE51), 13G9, 19A12, 20D12, 25B5, 30G7, SS-15057, SS-15058, SS-15059, SS-15065, SS-15079, SS-15080, SS-15087, SS-15101, SS-15103, SS-15104, SS-15105, SS-15106, SS-15108, SS-15112, SS-15113, SS-15114, SS-15117, SS-15121, SS-15123, SS-15124, SS-15126, SS-15132, SS-15133, SS-15136, SS-15139, SS-15140, SS-15141, SS-13983 (A01), SS-13991 (A02), SS-13993 (C02), SS-12685 (P1B1), SS-12686 (P2F5), SS-12687 (P2C6), SS-14892 (P2F5/P2C6), SS-15509, SS-15510, SS-15511, SS-15512, SS-15513, SS-15514, SS-15497, SS-15515, SS-15516, SS-15517, SS-15518, SS-15519, SS-15520, SS-15522, SS-15524, SS-14835, SS-15194, SS-15195, SS-15196, SS-14894, SS-15504, SS-15494, SS-14892, SS-15495, SS-15496, SS-15497, SS-115503, SS-15505, SS-15506, SS-15507, SS-15502, SS-15508, SS-1550, SS-15500, SS-15003, SS-15005, SS-15757 (P1F4), SS-15758 (P1B6), SS-15759 (P2F4), SS-15761 (P2G5), SS-15763 (P2H7) or SS-15764 (P2H8).

[0005] In a further embodiment, an anti-PCSK9 antigen binding protein of any of the above described ABPS, wherein the antigen binding protein is a monoclonal antibody is provided. In a further embodiment, an anti-PCSK9 antigen binding protein of any of the above described ABPS, wherein the antibody is humanized is provided. In a further embodiment, an anti-PCSK9 antibody of any of the above described antibodies, wherein the antibody is human is provided. In a further embodiment, an anti-PCSK9 antibody of any of the above described antibodies, wherein the antibody is an antibody fragment selected from a Fab, Fab′-SH, Fv, scFv or (Fab′).sub.2 fragment is provided. In a further embodiment, an anti-PCSK9 antibody of any of the above described antibodies, wherein at least a portion of the framework sequence is a human consensus framework sequence is provided.

[0006] In a further embodiment, an isolated nucleic acid encoding an anti-PCSK9 antigen binding protein of any of the above described ABPs is provided. In a further embodiment, a vector comprising the nucleic acid encoding an above described ABP is provided. In one embodiment, the vector of the invention is an expression vector. In another embodiment, a host cell comprising the vector of the invention is provided. In one embodiment host cell of the invention is a prokaryotic host cell. In another embodiment of the invention, the host cell is a eukaryotic host cell. In a further embodiment, a method for making an anti-PCSK9 antigen binding protein of the invention, said method comprising culturing a host cell comprising a vector comprising a nucleic acid encoding an above described anti-PCSK9 antigen binding protein 1 under conditions suitable for expression of the nucleic acid encoding the anti-PCSK9 antibody is provided. In a further embodiment the method of the invention, further comprising recovering the anti-PCSK9 antigen binding protein from the host cell is provided.

[0007] In another embodiment, a pharmaceutical composition comprising an above described anti-PCSK9 antigen binding protein and a pharmaceutically acceptable carrier is provided. In a further embodiment, a method of reducing LDL-cholesterol level in a subject, said method comprising administering to the subject an effective amount of any of the above described anti-PCSK9 antigen binding proteins is provided. In a further embodiment, a method of treating cholesterol related disorder in a subject, said method comprising administering to the subject an effective amount of any of the above-described anti-PCSK9 antigen binding proteins is provided. In a further embodiment, a method of treating hypercholesterolemia in a subject, said method comprising administering to the subject an effective amount of the any of the above-described anti-PCSK9 antigen binding proteins is provided. In another embodiment, the above described method of treatment further comprising administering to the subject an effective amount of a second medicament, wherein the anti-PCSK9 antigen binding protein is the first medicament is provided. In some embodiments a method wherein the second medicament elevates the level of LDLR is provided. In some embodiments a method wherein the second medicament reduces the level of LDL-cholesterol is provided. In some embodiments, a method wherein the second medicament comprises a statin is provided. In some embodiments, a method wherein the statin is selected from the group consisting of atorvastatin, fluvastatin, lovastatin, mevastatin, pitavastatin, pravastatin, rosuvastatin, simvastatin, and any combination thereof, is provided. In another embodiment, a method of inhibiting binding of PCSK9 to LDLR in a subject, said method comprising administering to the subject an effective amount of any of the above described anti-PCSK9 antigen binding proteins is provided.

[0008] In a further embodiment, a method of detecting PCSK9 protein in a sample, said method comprising (a) contacting the sample with any of the above described antigen binding proteins and (b) detecting formation of a complex between the anti-PCSK9 antigen binding protein and the PCSK9 protein is provided.

### BRIEF DESCRIPTION OF THE FIGURES

[0009] FIG. 1 is a graph of a surface plasmon resonance screen of 8A3 antibody variants (having the indicated single amino acid substitutions) having binding affinity at pH 7.4 on the vertical axis and estimated complex half life at pH 5.5 on the horizontal axis.

[0010] FIG. 2 is a graph of a surface plasmon resonance screen of 8A3 antibody variants (having the indicated heavy and light chain combination amino acid variations) having binding affinity at pH 7.4 on the vertical axis and estimated complex half life at pH 5.5 on the horizontal axis

[0011] FIG. 3 is a graph of a surface plasmon resonance screen of 31H4 antibody variants (having the indicated substitutions) having binding affinity at pH 7.4 on the vertical axis and estimated complex half life at pH 5.5 on the horizontal axis.

[0012] FIGS. 4A and B are graphs depicting antibody variant P2C6 inhibition of LDL uptake in human HepG2 cells.

[0013] FIG. 5A-D is a series of graphs depicting antibody variant effect on LDL-C, HDL-C, total cholesterol and triglyceride levels in vivos.

[0014] FIG. 6 is a timeline showing when blood samples were taken.

[0015] FIG. 7A is a graph depicting antibody variant (comprising constant domain variations) effect on serum LDL-C in vivos. FIG. 7B is a graph depicting antibody variant (comprising constant domain variations) concentration over time in vivos

### DETAILED DESCRIPTION

[0016] The section headings used herein are for organizational purposes only and are not to be construed as limiting the subject matter described.

[0017] Unless otherwise defined herein, scientific and technical terms used in connection with the present application shall have the meanings that are commonly understood by those of ordinary skill in the art. Further, unless otherwise required by context, singular terms shall include pluralities and plural terms shall include the singular.

[0018] Generally, nomenclatures used in connection with, and techniques of, cell and tissue culture, molecular biology, immunology, microbiology, genetics and protein and nucleic acid chemistry and hybridization described herein are those well known and commonly used in the art. The methods and techniques of the present application are generally performed according to conventional methods well known in the art and as described in various general and more specific references that are cited and discussed throughout the present specification unless otherwise indicated. See, e.g., Sambrook et al., Molecular Cloning: A Laboratory Manual, 3^{rd} ed., Cold Spring Harbor Laboratory Press, Cold Spring Harbor, N.Y. (2001) and subsequent editions, Ausubel et al., Current Protocols in Molecular Biology, Greene Publishing Associates (1992), and Harlow & Lane, Antibodies: A Laboratory Manual, Cold Spring Harbor Laboratory Press, Cold Spring Harbor, N.Y. (1988), which are incorporated herein by reference. Enzymatic reactions and purification techniques are performed according to manufacturer's specifications, as commonly accomplished in the art or as described herein. The terminology used in connection with, and the laboratory procedures and techniques of, analytical chemistry, synthetic organic chemistry, and medicinal and pharmaceutical chemistry described herein are those well known and commonly used in the art. Standard techniques can be used for chemical syntheses, chemical analyses, pharmaceutical preparation, formulation, and delivery, and treatment of patients.

[0019] It should be understood that the instant disclosure is not limited to the particular methodology, protocols, and reagents, etc., described herein and as such can vary. The terminology used herein is for the purpose of describing particular embodiments only, and is not intended to limit the scope of the present disclosure.

[0020] Other than in the operating examples, or where otherwise indicated, all numbers expressing quantities of ingredients or reaction conditions used herein should be understood as modified in all instances by the term “about.” The term “about” when used in connection with percentages can mean±5%, e.g., 1%, 2%, 3%, or 4%.

### I. DEFINITIONS

[0021] As used herein, the terms “a” and “an” mean “one or more” unless specifically stated otherwise.

[0022] As used herein, an “antigen binding protein” is a protein comprising a portion that binds to an antigen or target and, optionally, a scaffold or framework portion that allows the antigen binding portion to adopt a conformation that promotes binding of the antigen binding protein to the antigen. Examples of antigen binding proteins include a human antibody, a humanized antibody; a chimeric antibody; a recombinant antibody; a single chain antibody; a diabody; a triabody; a tetrabody; a Fab fragment; a F(ab′)₂ fragment; an IgD antibody; an IgE antibody; an IgM antibody; an IgG1 antibody; an IgG2 antibody; an IgG3 antibody; or an IgG4 antibody, and fragments thereof. The antigen binding protein can comprise, for example, an alternative protein scaffold or artificial scaffold with grafted CDRs or CDR derivatives. Such scaffolds include, but are not limited to, antibody-derived scaffolds comprising mutations introduced to, for example, stabilize the three-dimensional structure of the antigen binding protein as well as wholly synthetic scaffolds comprising, for example, a biocompatible polymer. See, e.g., Komdorfer et al., (2003) Proteins: Structure, Function, and Bioinformatics, 53(1):121-129; Roque et al., (2004) Biotechnol. Prog. 20:639-654. In addition, peptide antibody mimetics (“PAMs”) can be used, as well as scaffolds based on antibody mimetics utilizing fibronectin components as a scaffold.

[0023] An antigen binding protein can have, for example, the structure of a naturally occurring immunoglobulin. An “immunoglobulin” is a tetrameric molecule. In a naturally occurring immunoglobulin, each tetramer is composed of two identical pairs of polypeptide chains, each pair having one “light” (about 25 kDa) and one “heavy” chain (about 50-70 kDa). The amino-terminal portion of each chain includes a variable region of about 100 to 110 or more amino acids primarily responsible for antigen recognition. The carboxy-terminal portion of each chain defines a constant region primarily responsible for effector function. Human light chains are classified as kappa and lambda light chains. Heavy chains are classified as mu, delta, gamma, alpha, or epsilon, and define the antibody's isotype as IgM, IgD, IgG, IgA, and IgE, respectively. Within light and heavy chains, the variable and constant regions are joined by a “J” region of about 12 or more amino acids, with the heavy chain also including a “D” region of about 10 more amino acids. See generally, Fundamental Immunology 2^{nd} ed. Ch. 7 (Paul, W., ed., Raven Press, N.Y. (1989)), incorporated by reference in its entirety for all purposes. The variable regions of each light/heavy chain pair form the antibody binding site such that an intact immunoglobulin has two binding sites.

[0024] Naturally occurring immunoglobulin chains exhibit the same general structure of relatively conserved framework regions (FR) joined by three hypervariable regions, also called complementarity determining regions or CDRs. From N-terminus to C-terminus, both light and heavy chains comprise the domains FR1, CDR1, FR2, CDR2, FR3, CDR3 and FR4. The assignment of amino acids to each domain can be done in accordance with the definitions of Kabat et al., (1991) “Sequences of Proteins of Immunological Interest”, 5^{th} Ed., US Dept. of Health and Human Services, PHS, NIH, NIH Publication no. 91-3242. Although presented herein using the Kabat nomenclature system, as desired, the CDRs disclosed herein can also be redefined according an alternative nomenclature scheme, such as that of Chothia (see Chothia & Lesk, (1987) J. Mol. Biol. 196:901-917; Chothia et al., (1989) Nature 342:878-883 or Honegger & Pluckthun, (2001) J. Mol. Biol. 309:657-670).

[0025] In the context of the instant disclosure an antigen binding protein is said to “specifically bind” or “selectively bind” its target antigen when the dissociation constant (K_{D}) is ≦10⁻⁸ M. The antibody specifically binds antigen with “high affinity” when the K_{D} is ≦5×10⁻⁹ M, and with “very high affinity” when the K_{D} is ≦5×10⁻¹ M. In one embodiment, the antibodies will bind to PCSK9 with a K_{D} of between about 10⁻⁷ M and 10⁻¹² M, and in yet another embodiment the antibodies will bind with a K_{D}≦5×10⁻⁹.

[0026] An “antibody” refers to an intact immunoglobulin or to an antigen binding portion thereof that competes with the intact antibody for specific binding, unless otherwise specified. Antigen binding portions can be produced by recombinant DNA techniques or by enzymatic or chemical cleavage of intact antibodies. Antigen binding portions include, inter alia, Fab, Fab′, F(ab′)₂, Fv, domain antibodies (dAbs), fragments including complementarity determining regions (CDRs), single-chain antibodies (scFv), chimeric antibodies, diabodies, triabodies, tetrabodies, and polypeptides that contain at least a portion of an immunoglobulin that is sufficient to confer specific antigen binding to the polypeptide.

[0027] A Fab fragment is a monovalent fragment having the V_{L}, V_{H}, C_{L} and C_{H}1 domains; a F(ab′)₂ fragment is a bivalent fragment having two Fab fragments linked by a disulfide bridge at the hinge region; a Fd fragment has the V_{H} and C_{H}1 domains; an Fv fragment has the V_{L} and V_{H} domains of a single arm of an antibody; and a dAb fragment has a V_{H} domain, a V_{L} domain, or an antigen-binding fragment of a V_{H} or V_{L} domain (U.S. Pat. Nos. 6,846,634, and 6,696,245; and US App. Pub. Nos. 05/0202512, 04/0202995, 04/0038291, 04/0009507, 03/0039958, Ward et al., Nature 341:544-546 (1989)).

[0028] A single-chain antibody (scFv) is an antibody in which a V₁ and a V₁ region are joined via a linker (e.g., a synthetic sequence of amino acid residues) to form a continuous protein chain wherein the linker is long enough to allow the protein chain to fold back on itself and form a monovalent antigen binding site (see, e.g., Bird et al., (1988) Science 242:423-26 and Huston et al., (1988) Proc. Natl. Acad. Sci. USA 85:5879-83). Diabodies are bivalent antibodies comprising two polypeptide chains, wherein each polypeptide chain comprises V_{H} and V_{L} domains joined by a linker that is too short to allow for pairing between two domains on the same chain, thus allowing each domain to pair with a complementary domain on another polypeptide chain (see, e.g., Holliger et al., (1993) Proc. Natl. Acad. Sci. USA 90:6444-48, and Poljak et al., (1994) Structure 2:1121-23). If the two polypeptide chains of a diabody are identical, then a diabody resulting from their pairing will have two identical antigen binding sites. Polypeptide chains having different sequences can be used to make a diabody with two different antigen binding sites. Similarly, tribodies and tetrabodies are antibodies comprising three and four polypeptide chains, respectively, and forming three and four antigen binding sites, respectively, which can be the same or different.

[0029] Complementarity determining regions (CDRs) and framework regions (FR) of a given antibody can be identified using the system described by Kabat et al., (1991) “Sequences of Proteins of Immunological Interest”, 5^{th} Ed., US Dept. of Health and Human Services, PHS, NIH, NIH Publication no. 91-3242. Although presented using the Kabat nomenclature system, as desired, the CDRs disclosed herein can also be redefined according an alternative nomenclature scheme, such as that of Chothia (see Chothia & Lesk, (1987) J. Mol. Biol. 196:901-917; Chothia et al., (1989) Nature 342:878-883 or Honegger & Pluckthun, (2001) J. Mol. Biol. 309:657-670). One or more CDRs can be incorporated into a molecule either covalently or noncovalently to make it an antigen binding protein. An antigen binding protein can incorporate the CDR(s) as part of a larger polypeptide chain, can covalently link the CDR(s) to another polypeptide chain, or can incorporate the CDR(s) noncovalently. The CDRs permit the antigen binding protein to specifically bind to a particular antigen of interest.

[0030] An antigen binding protein can but need not have one or more binding sites. If there is more than one binding site, the binding sites can be identical to one another or can be different. For example, a naturally occurring human immunoglobulin typically has two identical binding sites, while a “bispecific” or “bifunctional” antibody has two different binding sites. Antigen binding proteins of this bispecific form (e.g., those comprising various heavy and light chain CDRs provided herein) comprise aspects of the instant disclosure.

[0031] The term “human antibody” includes all antibodies that have one or more variable and constant regions derived from human immunoglobulin sequences. In one embodiment, all of the variable and constant domains are derived from human immunoglobulin sequences (a fully human antibody). These antibodies can be prepared in a variety of ways, examples of which are described below, including through the immunization with an antigen of interest of a mouse that is genetically modified to express antibodies derived from human heavy and/or light chain-encoding genes, such as a mouse derived from a XENOMOUSE®, ULTIMAB™, HUMAB-MOUSE®, VELOCIMOUSE®, VELOCIMMUNE®, KYMOUSE, or ALIVAMAB system, or derived from human heavy chain transgenic mouse, transgenic rat human antibody repertoire, transgenic rabbit human antibody repertoire or cow human antibody repertoire or HUTARG™ technology. Phage-based approaches can also be employed.

[0032] A humanized antibody has a sequence that differs from the sequence of an antibody derived from a non-human species by one or more amino acid substitutions, deletions, and/or additions, such that the humanized antibody is less likely to induce an immune response, and/or induces a less severe immune response, as compared to the non-human species antibody, when it is administered to a human subject. In one embodiment, certain amino acids in the framework and constant domains of the heavy and/or light chains of the non-human species antibody are mutated to produce the humanized antibody. In another embodiment, the constant domain(s) from a human antibody are fused to the variable domain(s) of a non-human species. In another embodiment, one or more amino acid residues in one or more CDR sequences of a non-human antibody are changed to reduce the likely immunogenicity of the non-human antibody when it is administered to a human subject, wherein the changed amino acid residues either are not critical for immunospecific binding of the antibody to its antigen, or the changes to the amino acid sequence that are made are conservative changes, such that the binding of the humanized antibody to the antigen is not significantly worse than the binding of the non-human antibody to the antigen. Examples of how to make humanized antibodies can be found in U.S. Pat. Nos. 6,054,297, 5,886,152 and 5,877,293.

[0033] The term “chimeric antibody” refers to an antibody that contains one or more regions from one antibody and one or more regions from one or more other antibodies. In one embodiment, one or more of the CDRs are derived from a human antibody that binds to PCSK9. In another embodiment, all of the CDRs are derived from a human antibody that binds to PCSK9. In another embodiment, the CDRs from more than one human antibody that binds to PCSK9 are mixed and matched in a chimeric antibody. For instance, a chimeric antibody can comprise a CDR1 from the light chain of a first human antibody that binds to PCSK9, a CDR2 and a CDR3 from the light chain of a second human antibody that binds to PCSK9, and the CDRs from the heavy chain from a third antibody that binds to PCSK9. Further, the framework regions can be derived from one of the same antibodies that binds PCSK9, from one or more different antibodies, such as a human antibody, or from a humanized antibody. In one example of a chimeric antibody, a portion of the heavy and/or light chain is identical with, homologous to, or derived from an antibody from a particular species or belonging to a particular antibody class or subclass, while the remainder of the chain(s) is/are identical with, homologous to, or derived from an antibody or antibodies from another species or belonging to another antibody class or subclass. Also included are fragments of such antibodies that exhibit the desired biological activity (e.g., the ability to specifically bind to PCSK9).

[0034] The term “light chain” includes a full-length light chain and fragments thereof having sufficient variable region sequence to confer binding specificity. A full-length light chain includes a variable region domain, V_{L}, and a constant region domain, C_{L}. The variable region domain of the light chain is at the amino-terminus of the polypeptide. Light chains include kappa (“κ”) chains and lambda (“λ”) chains.

[0035] The term “heavy chain” includes a full-length heavy chain and fragments thereof having sufficient variable region sequence to confer binding specificity. A full-length heavy chain includes a variable region domain, V_{H}, and three constant region domains, C_{H}1, C_{H}2, and C_{H}3. The V_{H} domain is at the amino-terminus of the polypeptide, and the C_{H} domains are at the carboxyl-terminus, with the C_{H}3 being closest to the carboxy-terminus of the polypeptide. Heavy chains can be of any isotype, including IgG (including IgG1, IgG2, IgG3 and IgG4 subtypes), IgA (including IgA1 and IgA2 subtypes), IgM and IgE.

[0036] The term “immunologically functional fragment” (or simply “fragment”) of an antigen binding protein, e.g., an antibody or immunoglobulin chain (heavy or light chain), as used herein, is an antigen binding protein comprising a portion (regardless of how that portion is obtained or synthesized) of an antibody that lacks at least some of the amino acids present in a full-length chain but which is capable of specifically binding to an antigen. Such fragments are biologically active in that they bind specifically to the target antigen and can compete with other antigen binding proteins, including intact antibodies, for specific binding to a given epitope. In one aspect, such a fragment will retain at least one CDR present in the full-length light or heavy chain, and in some embodiments will comprise a single heavy chain and/or light chain or portion thereof. These biologically active fragments can be produced by recombinant DNA techniques, or can be produced by enzymatic or chemical cleavage of antigen binding proteins, including intact antibodies. Immunologically functional immunoglobulin fragments include, but are not limited to, Fab, Fab′, F(ab′)₂, Fv, domain antibodies and single-chain antibodies, and can be derived from any mammalian source, including but not limited to human, mouse, rat, camelid or rabbit. It is contemplated further that a functional portion of the antigen binding proteins disclosed herein, for example, one or more CDRs, could be covalently bound to a second protein or to a small molecule to create a therapeutic agent directed to a particular target in the body, possessing bifunctional therapeutic properties, or having a prolonged serum half-life.

[0037] An “Fc” region contains two heavy chain fragments comprising the C_{H}2 and C_{H}3 domains of an antibody. The two heavy chain fragments are held together by two or more disulfide bonds and by hydrophobic interactions of the C_{H}3 domains.

[0038] An “Fab′ fragment” contains one light chain and a portion of one heavy chain that contains the V_{H} domain and the C_{H}1 domain and also the region between the C_{H}1 and C_{H}2 domains, such that an interchain disulfide bond can be formed between the two heavy chains of two Fab′ fragments to form an F(ab′) molecule.

[0039] An “F(ab′)₂ fragment” contains two light chains and two heavy chains containing a portion of the constant region between the C_{H}1 and C_{H}2 domains, such that an interchain disulfide bond is formed between the two heavy chains. A F(ab′)₂ fragment thus is composed of two Fab′ fragments that are held together by a disulfide bond between the two heavy chains.

[0040] The “Fv region” comprises the variable regions from both the heavy and light chains, but lacks the constant regions.

[0041] A “domain antibody” is an immunologically functional immunoglobulin fragment containing only the variable region of a heavy chain or the variable region of a light chain. In some instances, two or more V_{H} regions are covalently joined with a peptide linker to create a bivalent domain antibody. The two V_{H} regions of a bivalent domain antibody can target the same or different antigens.

[0042] A “hemibody” is an immunologically-functional immunoglobulin construct comprising a complete heavy chain, a complete light chain and a second heavy chain Fc region paired with the Fe region of the complete heavy chain. A linker can, but need not, be employed to join the heavy chain Fc region and the second heavy chain Fc region. In particular embodiments a hemibody is a monovalent form of an antigen binding protein disclosed herein. In other embodiments, pairs of charged residues can be employed to associate one Fc region with the second Fc region.

[0043] A “bivalent antigen binding protein” or “bivalent antibody” comprises two antigen binding sites. In some instances, the two binding sites have the same antigen specificities. Bivalent antigen binding proteins and bivalent antibodies can be bispecific, as described herein, and form aspects of the instant disclosure.

[0044] A “multispecific antigen binding protein” or “multispecific antibody” is one that targets more than one antigen or epitope, and forms another aspect of the instant disclosure.

[0045] A “bispecific,” “dual-specific” or “bifunctional” antigen binding protein or antibody is a hybrid antigen binding protein or antibody, respectively, having two different antigen binding sites. Bispecific antigen binding proteins and antibodies are a species of multispecific antigen binding protein or multispecific antibody and can be produced by a variety of methods including, but not limited to, fusion of hybridomas or linking of Fab′ fragments. See, e.g., Songsivilai and Lachmann, (1990) Clin. Exp. Immunol. 79:315-321; Kostelny et al., (1992) J. Immunol. 148:1547-1553. The two binding sites of a bispecific antigen binding protein or antibody will bind to two different epitopes, which can reside on the same (e.g., PCSK9) or different protein targets, including (e.g.: lecithin cholesterol acyl transferase (LCAT), angiopoietin protein like-3 (ANGPTL3), ANGPTL4, Endothelial Lipase (EL), apolipoprotein CIII (ApoCIII), lipoprotein lipase (LPL), fibroblast growth factor 21 (FGF21)).

[0046] The term “polynucleotide” or “nucleic acid” includes both single-stranded and double-stranded nucleotide polymers. The nucleotides comprising the polynucleotide can be ribonucleotides or deoxyribonucleotides or a modified form of either type of nucleotide. Said modifications include base modifications such as bromouridine and inosine derivatives, ribose modifications such as 2′,3′-dideoxyribose, and internucleotide linkage modifications such as phosphorothioate, phosphorodithioate, phosphoroselenoate, phosphorodiselenoate, phosphoroanilothioate, phoshoraniladate and phosphoroamidate.

[0047] The term “oligonucleotide” means a polynucleotide comprising 200 or fewer nucleotides. In some embodiments, oligonucleotides are 10 to 60 bases in length. In other embodiments, oligonucleotides are 12, 13, 14, 15, 16, 17, 18, 19, or 20 to 40 nucleotides in length. Oligonucleotides can be single stranded or double stranded, e.g., for use in the construction of a mutant gene. Oligonucleotides can be sense or antisense oligonucleotides. An oligonucleotide can include a label, including a radiolabel, a fluorescent label, a hapten or an antigenic label, for detection assays. Oligonucleotides can be used, for example, as PCR primers, cloning primers or hybridization probes.

[0048] An “isolated nucleic acid molecule” means a DNA or RNA of genomic, mRNA, cDNA, or synthetic origin or some combination thereof which is not associated with all or a portion of a polynucleotide in which the isolated polynucleotide is found in nature, or is linked to a polynucleotide to which it is not linked in nature. For purposes of this disclosure, it is understood that “a nucleic acid molecule comprising” a particular nucleotide sequence does not encompass intact chromosomes. Isolated nucleic acid molecules “comprising” specified nucleic acid sequences can include, in addition to the specified sequences, coding sequences for up to ten or even up to twenty other proteins or portions thereof, or can include operably linked regulatory sequences that control expression of the coding region of the recited nucleic acid sequences, and/or can include vector sequences.

[0049] Unless specified otherwise, the left-hand end of any single-stranded polynucleotide sequence discussed herein is the 5′ end; the left-hand direction of double-stranded polynucleotide sequences is referred to as the 5′ direction. The direction of 5′ to 3′ addition of nascent RNA transcripts is referred to as the transcription direction; sequence regions on the DNA strand having the same sequence as the RNA transcript that are 5′ to the 5′ end of the RNA transcript are referred to as “upstream sequences;” sequence regions on the DNA strand having the same sequence as the RNA transcript that are 3′ to the 3′ end of the RNA transcript are referred to as “downstream sequences.”

[0050] The term “control sequence” refers to a polynucleotide sequence that can affect the expression and processing of coding sequences to which it is ligated. The nature of such control sequences can depend upon the host organism. In particular embodiments, control sequences for prokaryotes can include a promoter, a ribosomal binding site, and a transcription termination sequence. For example, control sequences for eukaryotes can include promoters comprising one or a plurality of recognition sites for transcription factors, transcription enhancer sequences, and transcription termination sequence. “Control sequences” can include leader sequences and/or fusion partner sequences.

[0051] The term “vector” means any molecule or entity (e.g., nucleic acid, plasmid, bacteriophage or virus) used to transfer protein coding information into a host cell.

[0052] The term “expression vector” or “expression construct” refers to a vector that is suitable for transformation of a host cell and contains nucleic acid sequences that direct and/or control (in conjunction with the host cell) expression of one or more heterologous coding regions operatively linked thereto. An expression construct can include, but is not limited to, sequences that affect or control transcription, translation, and, if introns are present, affect RNA splicing of a coding region operably linked thereto.

[0053] As used herein, “operably linked” means that the components to which the term is applied are in a relationship that allows them to carry out their inherent functions under suitable conditions. For example, a control sequence in a vector that is “operably linked” to a protein coding sequence is ligated thereto so that expression of the protein coding sequence is achieved under conditions compatible with the transcriptional activity of the control sequences.

[0054] The term “host cell” means a cell that has been transformed, or is capable of being transformed, with a nucleic acid sequence and thereby expresses a gene of interest. The term includes the progeny of the parent cell, whether or not the progeny is identical in morphology or in genetic make-up to the original parent cell, so long as the gene of interest is present.

[0055] The term “transduction” means the transfer of genes from one bacterium to another, usually by bacteriophage. “Transduction” also refers to the acquisition and transfer of eukaryotic cellular sequences by replication-defective retroviruses.

[0056] The term “transfection” means the uptake of foreign or exogenous DNA by a cell, and a cell has been “transfected” when the exogenous DNA has been introduced inside the cell membrane. A number of transfection techniques are well known in the art and are disclosed herein. See, e.g., Graham et al., (1973) Virology 52:456; Sambrook et al., (2001), supra; Davis et al., (1986) Basic Methods in Molecular Biology, Elsevier, Chu et al., (1981) Gene 13:197. Such techniques can be used to introduce one or more exogenous DNA moieties into suitable host cells.

[0057] The term “transformation” refers to a change in a cell's genetic characteristics, and a cell has been transformed when it has been modified to contain new DNA or RNA. For example, a cell is transformed where it is genetically modified from its native state by introducing new genetic material via transfection, transduction, or other techniques. Following transfection or transduction, the transforming DNA can recombine with that of the cell by physically integrating into a chromosome of the cell, or can be maintained transiently as an episomal element without being replicated, or can replicate independently as a plasmid. A cell is considered to have been “stably transformed” when the transforming DNA is replicated with the division of the cell.

[0058] The terms “polypeptide” or “protein” are used interchangeably herein to refer to a polymer of amino acid residues. The terms also apply to amino acid polymers in which one or more amino acid residues is an analog or mimetic of a corresponding naturally occurring amino acid, as well as to naturally occurring amino acid polymers. The terms can also encompass amino acid polymers that have been modified, e.g., by the addition of carbohydrate residues to form glycoproteins, or phosphorylated. Polypeptides and proteins can be produced by a naturally-occurring and non-recombinant cell, or polypeptides and proteins can be produced by a genetically-engineered or recombinant cell. Polypeptides and proteins can comprise molecules having the amino acid sequence of a native protein, or molecules having deletions from, additions to, and/or substitutions of one or more amino acids of the native sequence. The terms “polypeptide” and “protein” encompass antigen binding proteins that specifically or selectively bind to PCSK9, or sequences that have deletions from, additions to, and/or substitutions of one or more amino acids of an antigen binding protein that specifically or selectively binds to PCSK9. The term “polypeptide fragment” refers to a polypeptide that has an amino-terminal deletion, a carboxyl-terminal deletion, and/or an internal deletion as compared with the full-length protein. Such fragments can also contain modified amino acids as compared with the full-length protein. In certain embodiments, fragments are about five to 500 amino acids long. For example, fragments can be at least 5, 6, 8, 10, 14, 20, 50, 70, 100, 110, 150, 200, 250, 300, 350, 400, or 450 amino acids long. Useful polypeptide fragments include immunologically functional fragments of antibodies, including binding domains. In the case of an antigen binding protein that binds to PCSK9, useful fragments include but are not limited to a CDR region, a variable domain of a heavy or light chain, a portion of an antibody chain or just its variable region including two CDRs, and the like.

[0059] The term “isolated protein” referred means that a subject protein (1) is free of at least some other proteins with which it would normally be found, (2) is essentially free of other proteins from the same source, e.g., from the same species, (3) is expressed by a cell from a different species, (4) has been separated from at least about 50 percent of polynucleotides, lipids, carbohydrates, or other materials with which it is associated in nature, (5) is operably associated (by covalent or noncovalent interaction) with a polypeptide with which it is not associated in nature, or (6) does not occur in nature. Typically, an “isolated protein” constitutes at least about 5%, at least about 10%, at least about 25%, or at least about 50% of a given sample. Genomic DNA, cDNA, mRNA or other RNA, of synthetic origin, or any combination thereof can encode such an isolated protein. Preferably, the isolated protein is substantially free from proteins or polypeptides or other contaminants that are found in its natural environment that would interfere with its therapeutic, diagnostic, prophylactic, research or other use.

[0060] A “variant” of a polypeptide (e.g., an antigen binding protein, or an antibody) comprises an amino acid sequence wherein one or more amino acid residues are inserted into, deleted from and/or substituted into the amino acid sequence relative to another polypeptide sequence. Variants include fusion proteins.

[0061] A “derivative” of a polypeptide is a polypeptide (e.g., an antigen binding protein, or an antibody) that has been chemically modified in some manner distinct from insertion, deletion, or substitution variants, e.g., by conjugation to another chemical moiety.

[0062] The term “naturally occurring” as used throughout the specification in connection with biological materials such as polypeptides, nucleic acids, host cells, and the like, refers to materials which are found in nature.

[0063] “Antigen binding region” means a protein, or a portion of a protein, that specifically binds a specified antigen, e.g. PCSK9. For example, that portion of an antigen binding protein that contains the amino acid residues that interact with an antigen and confer on the antigen binding protein its specificity and affinity for the antigen is referred to as “antigen binding region.” An antigen binding region typically includes one or more “complementary binding regions” (“CDRs”). Certain antigen binding regions also include one or more “framework” regions. A “CDR” is an amino acid sequence that contributes to antigen binding specificity and affinity. “Framework” regions can aid in maintaining the proper conformation of the CDRs to promote binding between the antigen binding region and an antigen.

[0064] In certain aspects, recombinant antigen binding proteins that bind to PCSK9, are provided. In this context, a “recombinant protein” is a protein made using recombinant techniques, i.e., through the expression of a recombinant nucleic acid as described herein. Methods and techniques for the production of recombinant proteins are well known in the art.

[0065] The term “compete” when used in the context of antigen binding proteins (e.g., neutralizing antigen binding proteins, neutralizing antibodies, agonistic antigen binding proteins, agonistic antibodies and binding proteins that bind to PCSK9 that compete for the same epitope or binding site on a target means competition between antigen binding proteins as determined by an assay in which the antigen binding protein (e.g., antibody or immunologically functional fragment thereof) under study prevents or inhibits the specific binding of a reference molecule (e.g., a reference ligand, or reference antigen binding protein, such as a reference antibody) to a common antigen (e.g., PCSK9 or a fragment thereof). Numerous types of competitive binding assays can be used to determine if a test molecule competes with a reference molecule for binding. Examples of assays that can be employed include solid phase direct or indirect radioimmunoassay (RIA), solid phase direct or indirect enzyme immunoassay (EIA), sandwich competition assay (see, e.g., Stahli et al., (1983) Methods in Enzymology 9:242-253); solid phase direct biotin-avidin EIA (see, e.g., Kirkland et al., (1986) J. Immunol. 137:3614-3619) solid phase direct labeled assay, solid phase direct labeled sandwich assay (see, e.g., Harlow and Lane, (1988) supra); solid phase direct label RIA using 1-125 label (see, e.g., Morel et al., (1988) Molec. Immunol. 25:7-15); solid phase direct biotin-avidin EIA (see, e.g., Cheung, et al., (1990) Virology 176:546-552); and direct labeled RIA (Moldenhauer et al., (1990) Scand. J. Immunol. 32:77-82). Typically, such an assay involves the use of a purified antigen bound to a solid surface or cells bearing either of an unlabelled test antigen binding protein or a labeled reference antigen binding protein. Competitive inhibition is measured by determining the amount of label bound to the solid surface or cells in the presence of the test antigen binding protein. Usually the test antigen binding protein is present in excess. Antigen binding proteins identified by competition assay (competing antigen binding proteins) include antigen binding proteins binding to the same epitope as the reference antigen binding proteins and antigen binding proteins binding to an adjacent epitope sufficiently proximal to the epitope bound by the reference antigen binding protein for steric hindrance to occur. Additional details regarding methods for determining competitive binding are provided in the examples herein. Usually, when a competing antigen binding protein is present in excess, it will inhibit specific binding of a reference antigen binding protein to a common antigen by at least 40%, 45%, 50%, 55%, 60%, 65%, 70% or 75%. In some instance, binding is inhibited by at least 80%, 85%, 90%, 95%, or 97% or more.

[0066] The term “antigen” refers to a molecule or a portion of a molecule capable of being bound by a selective binding agent, such as an antigen binding protein (including, e.g., an antibody or immunological functional fragment thereof), and may also be capable of being used in an animal to produce antibodies capable of binding to that antigen. An antigen can possess one or more epitopes that are capable of interacting with different antigen binding proteins, e.g., antibodies.

[0067] The term “epitope” means the amino acids of a target molecule that are contacted by an antigen binding protein (for example, an antibody) when the antigen binding protein is bound to the target molecule. The term includes any subset of the complete list of amino acids of the target molecule that are contacted when an antigen binding protein, such as an antibody, is bound to the target molecule. An epitope can be contiguous or non-contiguous (e.g., (i) in a single-chain polypeptide, amino acid residues that are not contiguous to one another in the polypeptide sequence but that within in context of the target molecule are bound by the antigen binding protein, or (ii) in a multimeric receptor comprising two or more individual components, amino acid residues that are present on one or more of the individual components, but which are still bound by the antigen binding protein). In certain embodiments, epitopes can be mimetic in that they comprise a three dimensional structure that is similar to an antigenic epitope used to generate the antigen binding protein, yet comprise none or only some of the amino acid residues found in that epitope used to generate the antigen binding protein. Most often, epitopes reside on proteins, but in some instances can reside on other kinds of molecules, such as nucleic acids. Epitope determinants can include chemically active surface groupings of molecules such as amino acids, sugar side chains, phosphoryl or sulfonyl groups, and can have specific three dimensional structural characteristics, and/or specific charge characteristics. Generally, antigen binding proteins specific for a particular target molecule will preferentially recognize an epitope on the target molecule in a complex mixture of proteins and/or macromolecules.

[0068] The term “identity” refers to a relationship between the sequences of two or more polypeptide molecules or two or more nucleic acid molecules, as determined by aligning and comparing the sequences. “Percent identity” means the percent of identical residues between the amino acids or nucleotides in the compared molecules and is calculated based on the size of the smallest of the molecules being compared. For these calculations, gaps in alignments (if any) must be addressed by a particular mathematical model or computer program (i.e., an “algorithm”). Methods that can be used to calculate the identity of the aligned nucleic acids or polypeptides include those described in Computational Molecular Biology, (Lesk, A. M., ed.), (1988) New York: Oxford University Press; Biocomputing Informatics and Genome Projects, (Smith, D. W., ed.), 1993, New York: Academic Press; Computer Analysis of Sequence Data, Part I, (Griffin, A. M., and Griffin, H. G., eds.), 1994, New Jersey: Humana Press; von Heinje, G., (1987) Sequence Analysis in Molecular Biology, New York: Academic Press; Sequence Analysis Primer, (Gribskov, M. and Devereux, J., eds.), 1991, New York: M. Stockton Press; and Carillo et al., (1988) J. Applied Math. 48:1073.

[0069] In calculating percent identity, the sequences being compared are aligned in a way that gives the largest match between the sequences. The computer program used to determine percent identity is the GCG program package, which includes GAP (Devereux et al., (1984) Nucl. Acid Res. 12:387; Genetics Computer Group, University of Wisconsin, Madison, Wis.). The computer algorithm GAP is used to align the two polypeptides or polynucleotides for which the percent sequence identity is to be determined. The sequences are aligned for optimal matching of their respective amino acid or nucleotide (the “matched span”, as determined by the algorithm). A gap opening penalty (which is calculated as 3× the average diagonal, wherein the “average diagonal” is the average of the diagonal of the comparison matrix being used; the “diagonal” is the score or number assigned to each perfect amino acid match by the particular comparison matrix) and a gap extension penalty (which is usually 1/10 times the gap opening penalty), as well as a comparison matrix such as PAM 250 or BLOSUM 62 are used in conjunction with the algorithm. In certain embodiments, a standard comparison matrix (see, Dayhoff et al., (1978) Atlas of Protein Sequence and Structure 5:345-352 for the PAM 250 comparison matrix; Henikoff et al., (1992) Proc. Natl. Acad. Sci. U.S.A. 89:10915-10919 for the BLOSUM 62 comparison matrix) is also used by the algorithm.

[0070] Recommended parameters for determining percent identity for polypeptides or nucleotide sequences using the GAP program are the following:

[0071] Algorithm: Needleman et al., 1970, J. Mol. Biol. 48:443-453;

[0072] Comparison matrix: BLOSUM 62 from Henikoff et al., 1992. supra;

[0073] Gap Penalty: 12 (but with no penalty for end gaps)

[0074] Gap Length Penalty: 4

[0075] Threshold of Similarity: 0

[0076] Certain alignment schemes for aligning two amino acid sequences can result in matching of only a short region of the two sequences, and this small aligned region can have very high sequence identity even though there is no significant relationship between the two full-length sequences. Accordingly, the selected alignment method (e.g., the GAP program) can be adjusted if so desired to result in an alignment that spans at least 50 contiguous amino acids of the target polypeptide.

[0077] As used herein, “substantially pure” means that the described species of molecule is the predominant species present, that is, on a molar basis it is more abundant than any other individual species in the same mixture. In certain embodiments, a substantially pure molecule is a composition wherein the object species comprises at least 50% (on a molar basis) of all macromolecular species present. In other embodiments, a substantially pure composition will comprise at least 80%, 85%, 90%, 95%, or 99% of all macromolecular species present in the composition. In other embodiments, the object species is purified to essential homogeneity wherein contaminating species cannot be detected in the composition by conventional detection methods and thus the composition consists of a single detectable macromolecular species.

[0078] The terms “treat” and “treating” refer to any indicia of success in the treatment or amelioration of an injury, pathology or condition, including any objective or subjective parameter such as abatement; remission; diminishing of symptoms or making the injury, pathology or condition more tolerable to the patient; slowing in the rate of degeneration or decline; making the final point of degeneration less debilitating, improving a patient's physical or mental well-being. The treatment or amelioration of symptoms can be based on objective or subjective parameters; including the results of a physical examination, neuropsychiatric exams, and/or a psychiatric evaluation. For example, certain methods presented herein can be employed to treat dyslipidemia, either prophylactically or as an acute treatment, to decrease circulating cholesterol levels and/or ameliorate a symptom associated with primary hyperlipidemia (heterozygous familial and non-familial), mixed dyslipidemia, and homozygous familial hypercholesterolemia.

[0079] An “effective amount” is generally an amount sufficient to reduce the severity and/or frequency of symptoms, eliminate the symptoms and/or underlying cause, prevent the occurrence of symptoms and/or their underlying cause, and/or improve or remediate the damage that results from or is associated with diabetes, obesity and dyslipidemia. In some embodiments, the effective amount is a therapeutically effective amount or a prophylactically effective amount. A “therapeutically effective amount” is an amount sufficient to remedy a disease state (e.g., diabetes, obesity or dyslipidemia) or symptoms, particularly a state or symptoms associated with the disease state, or otherwise prevent, hinder, retard or reverse the progression of the disease state or any other undesirable symptom associated with the disease in any way whatsoever. A “prophylactically effective amount” is an amount of a pharmaceutical composition that, when administered to a subject, will have the intended prophylactic effect, e.g., preventing or delaying the onset (or reoccurrence) of diabetes, obesity or dyslipidemia, or reducing the likelihood of the onset (or reoccurrence) of diabetes, obesity or dyslipidemia or associated symptoms. The full therapeutic or prophylactic effect does not necessarily occur by administration of one dose, and may occur only after administration of a series of doses. Thus, a therapeutically or prophylactically effective amount can be administered in one or more administrations.

[0080] “Amino acid” takes its normal meaning in the art. The twenty naturally-occurring amino acids and their abbreviations follow conventional usage. See, Immunology-A Synthesis, 2^{nd} Edition, (E. S. Golub and D. R. Green, eds.), Sinauer Associates: Sunderland, Mass. (1991), incorporated herein by reference for any purpose. Stereoisomers (e.g., D-amino acids) of the twenty conventional amino acids, unnatural or non-naturally occurring or encoded amino acids such as α-,α-disubstituted amino acids, N-alkyl amino acids, and other unconventional amino acids can also be suitable components for polypeptides and are included in the phrase “amino acid.” Examples of non-natural and non-naturally encoded amino acids (which can be substituted for any naturally-occurring amino acid found in any sequence disclosed herein, as desired) include: 4-hydroxyproline, γ-carboxyglutamate, ε-N,N,N-trimethyllysine, ε-N-acetyllysine, O-phosphoserine, N-acetylserine, N-formylmethionine, 3-methylhistidine, 5-hydroxylysine, σ-N-methylarginine, and other similar amino acids and imino acids (e.g., 4-hydroxyproline). In the polypeptide notation used herein, the left-hand direction is the amino terminal direction and the right-hand direction is the carboxyl-terminal direction, in accordance with standard usage and convention. A non-limiting lists of examples of non-naturally occurring/encoded amino acids that can be inserted into an antigen binding protein sequence or substituted for a wild-type residue in an antigen binding sequence include β-amino acids, homoamino acids, cyclic amino acids and amino acids with derivatized side chains. Examples include (in the L-form or D-form; abbreviated as in parentheses): citrulline (Cit), homocitrulline (hCit), Nα-methylcitrulline (NMeCit), Nα-methylhomocitrulline (Nα-MeHoCit), ornithine (Orm), Nα-Methylornithine (Nα-MeOrn or NMeOrn), sarcosine (Sar), homolysine (hLys or hK), homoarginine (hArg or hR), homoglutamine (hQ), Nα-methylarginine (NMeR), Nα-methylleucine (Nα-MeL or NMeL), N-methylhomolysine (NMeHoK), Nα-methylglutamine (NMeQ), norleucine (Nle), norvaline (Nva), 1,2,3,4-tetrahydroisoquinoline (Tic), Octahydroindole-2-carboxylic acid (Oic), 3-(1-naphthyl)alanine (1-Nal), 3-(2-naphthyl)alanine (2-Nal), 1,2,3,4-tetrahydroisoquinoline (Tic), 2-indanylglycine (IgI), para-iodophenylalanine (pI-Phe), para-aminophenylalanine (4AmP or 4-Amino-Phe), 4-guanidino phenylalanine (Guf), glycyllysine (abbreviated “K(Nε-glycyl)” or “K(glycyl)” or “K(gly)”), nitrophenylalanine (nitrophe), aminophenylalanine (aminophe or Amino-Phe), benzylphenylalanine (benzylphe), γ-carboxyglutamic acid (γ-carboxyglu), hydroxyproline (hydroxypro), p-carboxyl-phenylalanine (Cpa), α-aminoadipic acid (Aad), Nα-methyl valine (NMeVal), N-α-methyl leucine (NMeLeu), Nα-methylnorleucine (NMeNle), cyclopentylglycine (Cpg), cyclohexylglycine (Chg), acetylarginine (acetylarg), α, β-diaminopropionoic acid (Dpr), α,γ-diaminobutyric acid (Dab), diaminopropionic acid (Dap), cyclohexylalanine (Cha), 4-methyl-phenylalanine (MePhe), β,β-diphenyl-alanine (BiPhA), aminobutyric acid (Abu), 4-phenyl-phenylalanine (or biphenylalanine; 4Bip), α-amino-isobutyric acid (Aib), beta-alanine, beta-aminopropionic acid, piperidinic acid, aminocaprioic acid, aminoheptanoic acid, aminopimelic acid, desmosine, diaminopimelic acid, N-ethylglycine, N-ethylaspargine, hydroxylysine, allo-hydroxylysine, isodesmosine, allo-isoleucine, N-methylglycine, N-methylisoleucine, N-methylvaline, 4-hydroxyproline (Hyp), γ-carboxyglutamate, ε-N,N,N-trimethyllysine, ε-N-acetyllysine, O-phosphoserine, N-acetylserine, N-formylmethionine, 3-methylhistidine, 5-hydroxylysine, ω-methylarginine, 4-Amino-O-Phthalic Acid (4APA), and other similar amino acids, and derivatized forms of any of those specifically listed.

### II. GENERAL OVERVIEW

[0081] Antigen-binding proteins that bind to PCSK9 with extended in vivo half livers are provided herein. In some embodiments, the antigen binding proteins of the invention having extended half lives are pH sensitive binders. In some embodiments the pH sensitive binders are engineered to be more pH sensitive than a starting antibody, for example, by mutating one or more residue to a histidian in one or more CDR in the heavy or light chain or both. In some embodiments, the antigen binding proteins of the invention having extended half lives comprise mutations in their constant domains. In some embodiments, the antigen binding proteins of the invention having extended half lives are pH sensitive binders and comprise mutations in their constant domains.

[0082] In some embodiments of the present disclosure the antigen binding proteins provided can comprise polypeptides into which one or more complementary determining regions (CDRs) can be embedded and/or joined. In such antigen binding proteins, the CDRs can be embedded into a “framework” region, which orients the CDR(s) such that the proper antigen binding properties of the CDR(s) is achieved. In general, such antigen binding proteins that are provided inhibit the binding of PCSK9 to the LDLR, Accordingly, the antigen binding proteins provided herein and offer potential therapeutic benefit for the range of conditions which hypercholesterolemia, primary hyperlipidemia (heterozygous familial and non-familial), mixed dyslipidemia, homozygous familial hypercholesterolemia, cardiovascular disease, and broadly any disease or condition in which it is desirable to inhibit in vivo the binding of PCSK9 to LDLR.

[0083] Certain antigen binding proteins described herein are antibodies or are derived from antibodies. In certain embodiments, the polypeptide structure of the antigen binding proteins is based on antibodies, including, but not limited to, monoclonal antibodies, bispecific antibodies, minibodies, domain antibodies, synthetic antibodies (sometimes referred to herein as “antibody mimetics”), chimeric antibodies, humanized antibodies, human antibodies, antibody fusions (sometimes referred to herein as “antibody conjugates”), hemibodies and fragments thereof. The various structures are further described herein below.

[0084] The antigen binding proteins provided herein have been demonstrated to bind PCSK9 (e.g., human PCSK9). The antigen binding proteins that specifically bind to PCSK9 that are disclosed herein have a variety of utilities. Some of the antigen binding proteins, for instance, are useful in specific binding assays, in the affinity purification of PCSK9, including the human PCSK9, and in screening assays to identify other inhibitors of PCSK9 binding to LDLR.

[0085] The antigen binding proteins that specifically bind to PCSK9 that are disclosed herein can be used in a variety of treatment applications, as explained herein. For example, certain antigen binding proteins are useful for treating conditions associated with elevated cholesterol levels in a patient, such as reducing, alleviating, or treating dyslipidemia and cardiovascular disease. Other uses for the antigen binding proteins include, for example, diagnosis of diseases or conditions associated with PCSK9 and screening assays to determine the presence or absence of PCSK9. Some of the antigen binding proteins described herein can be useful in treating conditions, symptoms and/or the pathology associated with increased cholesterol levels. Exemplary conditions include, but are not limited to, dyslipidemia and cardiovascular disease.

### PCSK9

[0086] The antigen binding proteins disclosed herein inhibit the binding of PCSK9 to LDLR as defined herein. In vivo, the mature form of PCSK9 is the active form of the molecule. The nucleotide sequence encoding full length human PCSK9 is provided; the nucleotides encoding the pro-domain sequence are underlined.

| Accession number NM_174936 | |
|---|---|
| (SEQ ID NO: 1) | |
| ATGGGCACCG TCAGCTCCAG GCGGTCCTGG TGGCCGCTGC CACTGCTGCT GCTGCTGCTG | 60 |
| CTGCTCCTGG GTCCCGCGGG CGCCCGTGCG CAGGAGGACG AGGACGGCGA CTACGAGGAG | 120 |
| CTGGTGCTAG CCTTGCGCTC CGAGGAGGAC GGCCTGGCCG AAGCACCCGA GCACGGAACC | 180 |
| ACAGCCACCT TCCACCGCTG CGCCAAGGAT CCGTGGAGGT TGCCTGGCAC CTACGTGGTG | 240 |
| GTGCTGAAGG AGGAGACCCA CCTCTCGCAG TCAGAGCGCA CTGCCCGCCG CCTGCAGGCC | 300 |
| CAGGCTGCCC GCCGGGGATA CCTCACCAAG ATCCTGCATG TCTTCCATGG CCTTCTTCCT | 360 |
| GGCTTCCTGG TGAAGATGAG TGGCGACCTG CTGGAGCTGG CCTTGAAGTT GCCCCATGTC | 420 |
| GACTACATCG AGGAGGACTC CTCTGTCTTT GCCCAGAGCA TCCCGTGGAA CCTGGAGCGG | 480 |
| ATTACCCCTC CGCGGTACCG GGCGGATGAA TACCAGCCCC CCGACGGAGG CAGCCTGGTG | 540 |
| GAGGTGTATC TCCTAGACAC CAGCATACAG AGTGACCACC GGGAAATCGA GGGCAGGGTC | 600 |
| ATGGTCACCG ACTTCGAGAA TGTGCCCGAG GAGGACGGGA CCCGCTTCCA CAGACAGGCC | 660 |
| AGCAAGTGTG ACAGTCATGG CACCCACCTG GCAGGGGTGG TCAGCGGCCG GGATGCCGGC | 720 |
| GTGGCCAAGG GTGCCAGCAT GCGCAGCCTG CGCGTGCTCA ACTGCCAAGG GAAGGGCACG | 780 |
| GTTAGCGGCA CCCTCATAGG CCTGGAGTTT ATTCGGAAAA GCCAGCTGGT CCAGCCTGTG | 840 |
| GGGCCACTGG TGGTGCTGCT GCCCCTGGCG GGTGGGTACA GCCGCGTCCT CAACGCCGCC | 900 |
| TGCCAGCGCC TGGCGAGGGC TGGGGTCGTG CTGGTCACCG CTGCCGGCAA CTTCCGGGAC | 960 |
| GATGCCTGCC TCTACTCCCC AGCCTCAGCT CCCGAGGTCA TCACAGTTGG GGCCACCAAT | 1020 |
| GCCCAGGACC AGCCGGTGAC CCTGGGGACT TTGGGGACCA ACTTTGGCCG CTGTGTGGAC | 1080 |
| CTCTTTGCCC CAGGGGAGGA CATCATTGGT GCCTCCAGCG ACTGCAGCAC CTGCTTTGTG | 1140 |
| TCACAGAGTG GGACATCACA GGCTGCTGCC CACGTGGCTG GCATTGCAGC CATGATGCTG | 1200 |
| TCTGCCGAGC CGGAGCTCAC CCTGGCCGAG TTGAGGCAGA GACTGATCCA CTTCTCTGCC | 1260 |
| AAAGATGTCA TCAATGAGGC CTGGTTCCCT GAGGACCAGC GGGTACTGAC CCCCAACCTG | 1320 |
| GTGGCCGCCC TGCCCCCCAG CACCCATGGG GCAGGTTGGC AGCTGTTTTG CAGGACTGTG | 1380 |
| TGGTCAGCAC ACTCGGGGCC TACACGGATG GCCACAGCCA TCGCCCGCTG CGCCCCAGAT | 1440 |
| GAGGAGCTGC TGAGCTGCTC CAGTTTCTCC AGGAGTGGGA AGCGGCGGGG CGAGCGCATG | 1500 |
| GAGGCCCAAG GGGGCAAGCT GGTCTGCCGG GCCCACAACG CTTTTGGGGG TGAGGGTGTC | 1560 |
| TACGCCATTG CCAGGTGCTG CCTGCTACCC CAGGCCAACT GCAGCGTCCA CACAGCTCCA | 1620 |
| CCAGCTGAGG CCAGCATGGG GACCCGTGTC CACTGCCACC AACAGGGCCA CGTCCTCACA | 1680 |
| GGCTGCAGCT CCCACTGGGA GGTGGAGGAC CTTGGCACCC ACAAGCCGCC TGTGCTGAGG | 1740 |
| CCACGAGGTC AGCCCAACCA GTGCGTGGGC CACAGGGAGG CCAGCATCCA CGCTTCCTGC | 1800 |
| TGCCATGCCC CAGGTCTGGA ATGCAAAGTC AAGGAGCATG GAATCCCGGC CCCTCAGGGG | 1860 |
| CAGGTGACCG TGGCCTGCGA GGAGGGCTGG ACCCTGACTG GCTGCAGCGC CCTCCCTGGG | 1920 |
| ACCTCCCACG TCCTGGGGGC CTACGCCGTA GACAACACGT GTGTAGTCAG GAGCCGGGAC | 1980 |
| GTCAGCACTA CAGGCAGCAC CAGCGAAGAG GCCGTGACAG CCGTTGCCAT CTGCTGCCGG | 2040 |
| AGCCGGCACC TGGCGCAGGC CTCCCAGGAG CTCCAG | 2076 |

[0087] The amino acid sequence of full length human PCSK9 is provided; the amino acids that make up the pro-domain sequence are underlined:

Accession number NM_777596
(SEQ ID NO: 2)
MGTVSSRRSWWPLPLLLLLLLLLGPAGARA
QEDEDGDYEELVLALRSEEDGLAEAPEHGTTATFHRCAKDPWRLPGTYV
VVLKEETHLSOSERTARRLQAQAARRGYLTKILHVFHGLLPGFLVKMSGD
LLELALKLPHVDYIEEDSSVFAQSIPWNLERITPPRYRADEYQPPDGGSL
VEVYLLDTSIQSDHREIEGRVMVTDFENVPEEDGTRFHRQASKCDSHGTH
LAGVVSGRDAGVAKGASMRSLRVLNCQGKGTVSGTLIGLEFIRKSQLVQ
PVGPLVVLLPLAGGYSRVLNAACQRLARAGVVLVTAAGNFRDDACLYS
PASAPEVITVGATNAQDQPVTLGTLGTNFGRCVDLFAPGEDIIGASSD
CSTCFVSQSGTSQAAAHVAGIAAMMLSAEPELTLAELRQRLIHFSAKD
VINEAWFPEDQRVLTPNLVAALPPSTHGAGWQLFCRTVWSAHSGPTRM
ATAIARCAPDEELLSCSSFSRSGKRRGERMEAQGGKLVCRAHNAFGGE
GVYAIARCCLLPQANCSVHTAPPAEASMGTRVHCHQQGHVLTGCSSHW
EVEDLGTHKPPVLRPRGQPNQCNGHREASIHASCCHAPGLECKVKEH
GIPAPQGQVTVACEEGWTLTGCSALPGTSHVLGAYAVDNTCVVRSRDV
STTGSTSEEAVTAVAICCRSRHLAQASQELQ

The nucleotide sequence encoding full length cynomolgus PCSK9 is provided; the nucleotides encoding the pro-domain sequence are underlined.

(SEQ ID NO: 3)
ATGGGTACCGTCAGCTCCAGGCGGTCCTGGTGGCCTCTGCCGCTGCCACT
GCTGCTGCTCCTGCTCCTGGGTCCCGCTGGCGCCCGTGCGCAGGAGGACG
AGGACGGCGACTACGAGGAGCTGGTGCTAGCCTTGCGTTCCGAGGAGGAC
GGCCTGGCCGACGCACCCGAGCACGGAGCCACAGCCACCTTCCACCGCTG
CGCCAAGGATCCGTGGAGGTTGCCCGGCACCTACGTGGTGGTGCTGAAGG
AGGAGACCCACCGCTCGCAGTCAGAGCGCACTGCCCGCCGCCTGCAGGCC
CAAGCTGCCCGCCGGGGATACCTCACCAAGATCCTGCATGTCTTCCATCA
CCTTCTTCCTGGCTTCCTGGTGAAGATGAGTGGCGACCTGCTGGAGCTGG
CCCTGAAGTTGCCCCATGTCGACTACATCGAGGAGGACTCCTCTGTCTTC
GCCCAGAGCATCCCATGGAACCTGGAGCGAATTACTCCTGCACGGTACCG
GGCGGATGAATACCAGCCCCCCAAAGGAGGCAGCCTGGTGGAGGTGTATC
TCCTAGACACCAGCATACAGAGTGACCACCGGGAAATCGAGGGCAGGGTC
ATGGTCACCGACTTCGAGAGTGTGCCCGAGGAGGACGGGACCCGCTTCCA
CAGACAGGCCAGCAAGTGTGACAGCCATGGCACCCACCTGGCAGGGGTGG
TCAGCGGCCGGGATGCCGGCGTGGCCAAGGGCGCCGGCCTGCGTAGCCTG
CGCGTGCTCAACTGCCAAGGGAAGGGCACGGTCAGCGGCACCCTCATAGG
CCTGGAGTTTATTCGGAAAAGCCAGCTGGTCCAGCCCGTGGGGCCACTGG
TTGTGCTGCTGCCCGTGGCGGGTGGGTACAGCCGGGTCTTCAACGCCGCC
TGCCAGCGCCTGGCGAGGGCTGGGGTCGTGCTGGTCACCGCTGCCGGCAA
CTTCCGGGACGATGCCTGCCTCTACTCTCCAGCCTCGGCTCCCGAGGTCA
TCACAGTTGGGGCCACCAATGCCCAGGACCAGCCGGTGACCCTGGGGACT
TTGGGGACCAACTTTGGCCGCTGTGTGGACCTCTTTGCCCCAGGGGAGGA
CATCATTGGTGCCTCCAGCGACTGCAGCACCTGCTTTGTGTCACGGAGTG
GGACATCGCAGGCTGCTGCCCACGTGGCTGGCATTGCAGCCATGATGCTG
TCTGCCGAGCCGGAGCTCACTCTGGCCGAGTTGAGGCAGAGACTGATCCA
CTTCTCTGCCAAAGATGTCATCAATGAGGCCTGGTTCCCTGAGGACCAGC
GGGTACTGACCCCCAACCTGGTGGCCGCCCTGCCCCCCAGCACCCACAGG
GCAGGTTGGCAGCTGTTTTGCAGGACTGTGTGGTCAGCACACTCGGGTCC
TACACGGATGGCCACAGCCGTAGCCCGCTGCGCCCAGGATGAGGAGCTGC
TGAGCTGCTCCAGTTTCTCCAGGAGTGGGAAGCGGCGGGGCGAGCGCATC
GAGGCCCAAGGGGGCAAGCGGGTCTGCCGGGCCCACAACGCTTTTGGGGG
TGAGGGTGTCTACGCCATTGCCAGGTGCTGCCTGCTACCCCAGGTCAACT
GCAGCGTCCACACAGCTCCACCAGCTGGGGCCAGCATGGGGACCCGTGTC
CACTGCCATCAGCAGGGCCACGTCCTCACAGGCTGCAGCTCCCACTGGGA
GGTGGAGGACCTTGGCACCCACAAGCCGCCTGTGCTGAGGCCACGAGGTC
AGCCCAACCAGTGTGTGGGCCACAGGGAGGCCAGCATCCACGCTTCCTGC
TGCCATGCCCCAGGTCTGGAATGCAAAGTCAGGGAGCATGGAATCCCGGC
CCCTCAGGAGCAGGTTATCGTGGCCTGTGAGGACGGCTGGACCCTGACCG
GCTGCAGTGCCCTCCCTGGGACCTCCCATGTCCTGGGGGCCTACGCTGTA
GACAACACGTGTGTGGTCAGGAGCCGGGACGTCAGCACCACAGGCAGCAC
CAGCGAAGAAGCCGTGGCAGCCGTTGCCATCTGCTGCCGGAGCCGGCACC
TGGTGCAGGCCTCCCAGGAGCTCCAG

[0088] The amino acid sequence of full length cynomolgous PCSK9 is provided; the amino acids that make up the pro-domain sequence are underlined:

(SEQ ID NO: 4)
MGTVSSRRSWWPLPLPLLLLLLLGPAGARA
QEDEDGDYEELVLALRSEEDGLADAPEHGATATFHRCAKDPWRLPGTYV
VVLKEETHRSQSERTARRLQAQAARRGYLTKILHVFHHLLPGFLVKMSG
DLLELALKLPHVDYIEEDSSVFAQSIPWNLERITPARYRADEYQPPKGG
SLVEVYLLDTSIQSDHREIEGRVMVTDFESVPEEDGTRFHRQASKCDSH
GTHLAGVVSGRDAGVAKGAGLRSLRVLNCQGKGTVSGTLIGLEFIRKSQ
LVQPVGPLVVLLPLAGGYSRVFNAACQRLARAGVVLVTAAGNFRDDACL
YSPASAPEVITVGATNAQDQPVTLGTLGTNFGRCVDLFAPGEDIIGASS
DCSTCFVSRSGTSQAAAHVAGIAAMMLSAEPELTLAELRQRLIHFSAKD
VINEAWFPEDQRVLTPNLVAALPPSTHRAGWQLFCRTVWSAHSGPTRMA
TAVARCAQDEELLSCSSFSRSGKLRRGERIEAQGGKRVCRAHNAFGGEG
VYAIARCCLLPQVNCSVHTAPPAGASMGTRVHCHQQGHVLTGCSSHWEV
EDLGTHKPPVLRPRGQPNQCVGHREASIHASCCHAPGLECKVREHGIPA
PQEQVIVACEDGWTLTGCSALPGTSHVLGAYAVDNTCVVRSRDVSTTGS
TSEEAVAAVAICCRSRHLVQASQELQ

[0089] As described herein, PCSK9 proteins can also include fragments. The term PCSK9 also includes post-translational modifications of the PCSK9 amino acid sequence, for example, possible N-linked glycosylation sites. Thus, the antigen binding proteins can bind to or be generated from proteins glycosylated at one or more position.

Antigen Binding Proteins that Specifically Bind to PCSK9

[0090] A variety of selective binding agents useful for inhibiting PCSK9 binding to LDLR are provided. These agents include, for instance, antigen binding proteins that contain an antigen binding domain (e.g., single chain antibodies, domain antibodies, hemibodies, immunoadhesions, and polypeptides with an antigen binding region) and specifically bind to PCSK9, in particular a human PCSK9.

[0091] In general, the antigen binding proteins that are provided typically comprise one or more CDRs as described herein (e.g., 1, 2, 3, 4, 5 or 6 CDRs). In some embodiments the antigen binding proteins are naturally expressed by clones, while in other embodiments, the antigen binding protein can comprise (a) a polypeptide framework structure and (b) one or more CDRs that are inserted into and/or joined to the polypeptide framework structure. In some of these embodiments a CDR forms a component of a heavy or light chains expressed by the clones described herein; in other embodiments a CDR can be inserted into a framework in which the CDR is not naturally expressed. A polypeptide framework structure can take a variety of different forms. For example, a polypeptide framework structure can be, or comprise, the framework of a naturally occurring antibody, or fragment or variant thereof, or it can be completely synthetic in nature. Examples of various antigen binding protein structures are further described below.

[0092] In some embodiments in which the antigen binding protein comprises (a) a polypeptide framework structure and (b) one or more CDRs that are inserted into and/or joined to the polypeptide framework structure, the polypeptide framework structure of an antigen binding protein is an antibody or is derived from an antibody, including, but not limited to, monoclonal antibodies, bispecific antibodies, minibodies, domain antibodies, synthetic antibodies (sometimes referred to herein as “antibody mimetics”), chimeric antibodies, humanized antibodies, antibody fusions (sometimes referred to as “antibody conjugates”), and portions or fragments of each, respectively. In some instances, the antigen binding protein is an immunological fragment of an antibody (e.g., a Fab, a Fab′, a F(ab′)₂, or a scFv).

[0093] Certain of the antigen binding proteins as provided herein specifically bind to PCSK9, including the human form of this protein. In one embodiment, an antigen binding protein specifically binds human self-cleaved, mature, secreted PCSK9 comprising amino acids 31 to 692 of the amino acid sequence of SEQ ID NO: 2 and inhibits PCSK9 from binding to LDLR. FIG. 1 is a conceptual depiction of how in some embodiments, the antigen binding proteins of the invention bind to human self-cleaved, mature, secreted PCSK9.

### Antigen Binding Protein Structure

[0094] Some of the antigen binding proteins that specifically bind PCSK9, including the human form provided herein have a structure typically associated with naturally occurring antibodies. The structural units of these antibodies typically comprise one or more tetramers, each composed of two identical couplets of polypeptide chains, though some species of mammals also produce antibodies having only a single heavy chain. In a typical antibody, each pair or couplet includes one full-length “light” chain (in certain embodiments, about 25 kDa) and one full-length “heavy” chain (in certain embodiments, about 50-70 kDa). Each individual immunoglobulin chain is composed of several “immunoglobulin domains,” each consisting of roughly 90 to 110 amino acids and expressing a characteristic folding pattern. These domains are the basic units of which antibody polypeptides are composed. The amino-terminal portion of each chain typically includes a variable domain that is responsible for antigen recognition. The carboxy-terminal portion is more conserved evolutionarily than the other end of the chain and is referred to as the “constant region” or “C region”. Human light chains generally are classified as kappa (“κ”) and lambda (“λ”) light chains, and each of these contains one variable domain and one constant domain. Heavy chains are typically classified as mu, delta, gamma, alpha, or epsilon chains, and these define the antibody's isotype as IgM, IgD, IgG, IgA, and IgE, respectively. IgG has several subtypes, including, but not limited to, IgG1, IgG2, IgG3, and IgG4. IgM subtypes include IgM, and IgM2. IgA subtypes include IgA1 and IgA2. In humans, the IgA and IgD isotypes contain four heavy chains and four light chains; the IgG and IgE isotypes contain two heavy chains and two light chains; and the IgM isotype contains five heavy chains and five light chains. The heavy chain C region typically comprises one or more domains that can be responsible for effector function. The number of heavy chain constant region domains will depend on the isotype. IgG heavy chains, for example, each contain three C region domains known as C_{H}1, C_{H}2 and C_{H}3. The antibodies that are provided can have any of these isotypes and subtypes. In certain embodiments, an antigen binding protein that specifically binds to PCSK9.

[0095] In full-length light and heavy chains, the variable and constant regions are joined by a “J” region of about twelve or more amino acids, with the heavy chain also including a “D” region of about ten more amino acids. See, e.g., Fundamental Immunology, 2nd ed., Ch. 7 (Paul, W., ed.) 1989, New York: Raven Press (hereby incorporated by reference in its entirety for all purposes). The variable regions of each light/heavy chain pair typically form the antigen binding site.

[0096] One example of an IgG2 heavy constant domain of an exemplary monoclonal antibody that specifically binds to PCSK9 has the amino acid sequence:

(SEQ ID NO: 5)
ASTKGPSVFPLAPCSRSTSESTAALGCLVKDYFPEPVTVSWNSGALTSGV
HTFPAVLQSSGLYSLSSVVTVPSSNFGTQTYTCNVDHKPSNTKVDKTVE
RKCCVECPPCPAPPVAGPSVFLFPPKPKDTLMISRTPEVTCVVVDVSHE
DPEVQFNWYVDGVEVHNAKTKPREEQFNSTFRVVSVLTVVHQDWLNGKE
YKCKVSNKGLPAPIEKTISKTKGQPREPQVYTLPPSREEMTKNQVSLTC
LVKGFYPSDIAVEWESNGQPENNYKTTPPMLDSDGSFFLYSKLTVDKSR
WQQGNVFSCSVMHEALHNHYTQKSLSLSPGK.

[0097] One example of a kappa light constant domain of an exemplary monoclonal antibody that binds to a PCSK9 has the amino acid sequence:

(SEQ ID NO: 6)
[sequence omitted]

[0098] One example of a lambda light constant domain of an exemplary monoclonal antibody that binds to PCSK9 has the amino acid sequence:

(SEQ ID NO: 7)
QPKANPTVTLFPPSSEELQANKATLVCLISDFYPGAVTV
AWKADGSPVKAGVETTKPSKQSNNKYAASSYLSLTPEQWKSHRSYSCQVT
HEGSTVEKTVAPTECS.

[0099] Variable regions of immunoglobulin chains generally exhibit the same overall structure, comprising relatively conserved framework regions (FR) joined by three hypervariable regions, more often called “complementarity determining regions” or CDRs. The CDRs from the two chains of each heavy chain/light chain pair mentioned above typically are aligned by the framework regions to form a structure that binds specifically with a specific epitope on the target protein (e.g., PCSK9). From N-terminal to C-terminal, naturally-occurring light and heavy chain variable regions both typically conform with the following order of these elements: FR1, CDR1, FR2, CDR2, FR3, CDR3 and FR4. A numbering system has been devised for assigning numbers to amino acids that occupy positions in each of these domains. This numbering system is defined in Kabat et al., (1991) “Sequences of Proteins of Immunological Interest”, 5^{th} Ed., US Dept. of Health and Human Services, PHS, NIH, NIH Publication no. 91-3242. Although presented using the Kabat nomenclature system, as desired, the CDRs disclosed herein can also be redefined according an alternative nomenclature scheme, such as that of Chothia (see Chothia & Lesk, (1987) J. Mol. Biol. 196:901-917; Chothia et al., (1989) Nature 342:878-883 or Honegger & Pluckthun, (2001) J. Mol. Biol. 309:657-670).

[0100] The various heavy chain and light chain variable regions of antigen binding proteins provided herein are depicted in Table 2. Each of these variable regions can be attached to the disclosed heavy and light chain constant regions to form a complete antibody heavy and light chain, respectively. Further, each of the so-generated heavy and light chain sequences can be combined to form a complete antibody structure. It should be understood that the heavy chain and light chain variable regions provided herein can also be attached to other constant domains having different sequences than the exemplary sequences listed above.

[0101] Specific examples of some of the full length light and heavy chains of the antibodies that are provided and their corresponding amino acid sequences are summarized in Tables 1A and 1B. Table 1A shows exemplary light chain sequences, and Table 1B shows exemplary heavy chain sequences.

TABLE 1A
Exemplary Antibody Light ChainSequences

| | SEQ | |
|---|---|---|
| | ID | |
| Ab ID | NO: | Amino AcidSequence |
| SS-13406 | 8 | MDMRVPAQLLGLLLLWLRGARCDIVMTQSPLSL |
| (8A3HLE-51) | | PVTPGEPASISCRSSQSLLHSNGYNYLDWYLQKP |
| | | GQSPQLLIYLGSNRASGVPDRFSGSGSGTDFTLKI |
| | | SRVEAEDVGVYYCMQALQTPLTFGGGTKVEIKR |
| | | TVAAPSVFIFPPSDEQLKSGTASVVCLLNNFYPRE |
| | | AKVQWKVDNALQSGNSQESVTEQDSKDSTYSLS |
| | | STLTLSKADYEKHKVYACEVTHQGLSSPVTKSF |
| | | NRGEC |
| SS-13407 | 9 | MDMRVPAQLLGLLLLWLRGARCDIVMTQSPLSL |
| (8A3HLE- | | PVTPGEPASISCRSSQSLLHSNGYNYLDWYLQKP |
| 112) | | GQSPQLLIYLGSNRASGVPDRFSGSGSGTDFTLKI |
| | | SRVEAEDVGVYYCMQALQTPLTFGGGTKVEIKR |
| | | TVAAPSVFIFPPSDEQLKSGTASVVCLLNNFYPRE |
| | | AKVQWKVDNALQSGNSQESVTEQDSKDSTYSLS |
| | | STLTLSKADYEKHKVYACEVTHQGLSSPVTKSF |
| | | NRGEC |
| SS-14888 | 10 | MDMRVPAQLLGLLLLWLRGARCDIVMTQSPLSL |
| (P2C6- | | PVTPGEPASISCRSSQSLLHSNGYNYLDWYLQKP |
| HLE51) | | GQSPQLLIYLGLNRASGVPDRFSGSGSGTDFTLKI |
| | | SRVEAEDVGVYYCMQALQTPLTFGGGTKVEIKR |
| | | TVAAPSVFIFPPSDEQLKSGTASVVCLLNNFYPRE |
| | | AKVQWKVDNALQSGNSQESVTEQDSKDSTYSLS |
| | | STLTLSKADYEKHKVYACEVTHQGLSSPVTKSF |
| | | NRGEC |
| 13G9 | 11 | QSVLTQPPSVSGAPGQRVTISCTGSRSNIGAGYD |
| | | VNWYQQLPGTAPKLLIYGNSNRPSGVPDRFSGS |
| | | KSGTSASLVITGLQAEDEADYYCQSYDSNLSGSV |
| | | FGGGTKLTVLGQPKANPTVTLFPPSSEELQANKA |
| | | TLVCLISDFYPGAVTVAWKADGSPVKAGVETTK |
| | | PSKQSNNKYAASSYLSLTPEQWKSHRSYSCQVT |
| | | HEGSTVEKTVAPTECS |
| 19A12 | 12 | DIVLTQSPDFLAVSLGERATINCKSSQNVLYSSSN |
| | | KNYLVWYQHKPGQPPKLLIYWASTRESGVPDRF |
| | | SGSGSGTDFTLTISSLQAEDVAVYYCHQYYSTPW |
| | | TFGQGTKVEIKRRTVAAPSVFIFPPSDEQLKSGTA |
| | | SVVCLLNNFYPREAKVQWKVDNALQSGNSQES |
| | | VTEQDSKDSTYSLSSTLTLSKADYEKHKVYACE |
| | | VTHQGLSSPVTKSFNRGEC |
| 20D12 | 13 | QSVLTQPPSASGTPGQRVTISCSGSNSNIGSNTVN |
| | | WYQQVPGTAPKLLIYSNNQRPSGVPDRFSGSKSG |
| | | TSASLAISGLQSEDEADYYCAAWDDSLNGWVFG |
| | | GGTKLTVLGQPKANPTVTLFPPSSEELQANKATL |
| | | VCLISDFYPGAVTVAWKADGSPVKAGVETTKPS |
| | | KQSNNKYAASSYLSLTPEQWKSHRSYSCQVTHE |
| | | GSTVEKTVAPTECS |
| 25B5 | 14 | QSALTQPASVSGSPGQSITISCTGTSSDVGGYNSV |
| | | SWYQQHPGKPPKLMIYEVSNRPSGISNRFSGSKS |
| | | GNTASLTISGLQAEDEADYFCSSYTSTSMVFGGG |
| | | TKLAVLRQPKANPTVTLFPPSSEELQANKATLVC |
| | | LISDFYPGAVTVAWKADGSPVKAGVETTKPSKQ |
| | | SNNKYAASSYLSLTPEQWKSHRSYSCQVTHEGS |
| | | TVEKTVAPTECS |
| 30G7 | 15 | QSALTQPASVSGSPGQSITISCTGTSSDVGGYNSV |
| | | SWYQQHPGKPPKLMIYEVSNRPSGVSNRFSGSKS |
| | | ANTASLTISGLQADDEADYFCSSYTSTSMVFGGG |
| | | TKLTVLRQPKANPTVTLFPPSSEELQANKATLVC |
| | | LISDFYPGAVTVAWKADGSPVKAGVETTKPSKQ |
| | | SNNKYAASSYLSLTPEQWKSHRSYSCQVTHEGS |
| | | TVEKTVAPTECS |
| SS-15057 | 16 | MDMRVPAQLLGLLLLWLRGARCESVLTQPPSVS |
| | | GAPGQRVTISCTGSSSNIGAGHDVHWYQQLPGT |
| | | APKLLISGNSNRPSGVPDRFSGSKSGTSASLAITG |
| | | LQAEDEADYYCQSYDSSLSGSVFGGGTKLTVLG |
| | | QPKAAPSVILFPPSSEELQANKATLVCLISDFYPG |
| | | AVTVAWKADSSPVKAGVETTTPSKQSNNKYAA |
| | | SSYLSLTPEQWKSHRSYSCQVTHEGSTVEKTVAP |
| | | TECS |
| 15058 | 17 | MDMRVPAQLLGLLLLWLRGARCESVLTQPPSVS |
| | | GAPGQRVTISCTGSSSNIGAGHDVHWYQQLPGT |
| | | APKLLISGNSNRPSGVPDRFSGSKSGTSASLAITG |
| | | LQAEDEADYYCQSYDSSLSGSVFGGGTKLTVLG |
| | | QPKAAPSVTLFPPSSEELQANKATLVCLISDFYPG |
| | | AVTVAWKADSSPVKAGVETTTPSKQSNNKYAA |
| | | SSYLSLTPEQWKSHRSYSCQVTHEGSTVEKTVAP |
| | | TECS |
| 15059 | 18 | MDMRVPAQLLGLLLLWLRGARCESVLTQPPSVS |
| | | GAPGQRVTISCTGSSSNIGAGHDVHWYQQLPGT |
| | | APKLLISGNSNRPSGVPDRFSGSKSGTSASLAITG |
| | | LQAEDEADYYCQSYDSSLSGSVFGGGTKLTVLG |
| | | QPKAAPSVTLFPPSSEELQANKATLVCLISDFYPG |
| | | AVTVAWKADSSPVKAGVETTTPSKQSNNKYAA |
| | | SSYLSLTPEQWKSHRSYSCQVTHEGSTVEKTVAP |
| | | TECS |
| 15065 | 19 | MDMRVPAQLLGLLLLWLRGARCESVLTQPPSVS |
| | | GAPGQRVTISCTGSSSNIGAGHDVHWYQQLPGT |
| | | APKLLISGNSNRPSGVPDRFSGSKSGTSASLAITG |
| | | LQAEDEADYYCQSYDSSLSGSVFGGGTKLTVLG |
| | | QPKAAPSVTLFPPSSEELQANKATLVCLISDFYPG |
| | | AVTVAWKADSSPVKAGVETTTPSKQSNNKYAA |
| | | SSYLSLTPEQWKSHRSYSCQVTHEGSTVEKTVAP |
| | | TECS |
| 15079 | 20 | MDMRVPAQLLGLLLLWLRGARCESVLTQPPSVS |
| | | GAPGQRVTISCTGSSSNIGAGYDVHWYQQLPGT |
| | | APKLLISGNSNRPSGVPDRFSGSKSGTSASLAITG |
| | | LQAEDEADYYCQSYDSSLHGSVFGGGTKLTVLG |
| | | QPKAAPSVTLFPPSSEELQANKATLVCLISDFYPG |
| | | AVTVAWKADSSPVKAGVETTTPSKQSNNKYAA |
| | | SSYLSLTPEQWKSHRSYSCQVTHEGSTVEKTVAP |
| | | TECS |
| 15080 | 21 | MDMRVPAQLLGLLLLWLRGARCESVLTQPPSVS |
| | | GAPGQRVTISCTGSSSNIGAGYDVHWYQQLPGT |
| | | APKLLISGNSNRPSGVPDRFSGSKSGTSASLAITG |
| | | LQAEDEADYYCQSYDSSLHGSVFGGGTKLTVLG |
| | | QPKAAPSVTLFPPSSEELQANKATLVCLISDFYPG |
| | | AVTVAWKADSSPVKAGVETTTPSKQSNNKYAA |
| | | SSYLSLTPEQWKSHRSYSCQVTHEGSTVEKTVAP |
| | | TECS |
| 15087 | 22 | MDMRVPAQLLGLLLLWLRGARCESVLTQPPSVS |
| | | GAPGQRVTISCTGSSSNIGAGYDVHWYQQLPGT |
| | | APKLLISGNSNRPSGVPDRFSGSKSGTSASLAITG |
| | | LQAEDEADYYCQSYDSSLHGSVFGGGTKLTVLG |
| | | QPKAAPSVTLFPPSSEELQANKATLVCLISDFYPG |
| | | AVTVAWKADSSPVKAGVETTTPSKQSNNKYAA |
| | | SSYLSLTPEQWKSHRSYSCQVTHEGSTVEKTVAP |
| | | TECS |
| 15101 | 23 | MDMRVPAQLLGLLLLWLRGARCESVLTQPPSVS |
| | | GAPGQRVTISCTGSSSNIGAGYDVHWYQQLPGT |
| | | APKLLISGNSNRPSGVPDRFSGSKSGTSASLAITG |
| | | LQAEDEADYYCQSYDSSLSGSVFGGGTKLTVLG |
| | | QPKAAPSVTLFPPSSEELQANKATLVCLISDFYPG |
| | | AVTVAWKADSSPVKAGVETTTPSKQSNNKYAA |
| | | SSYLSLTPEQWKSHRSYSCQVTHEGSTVEKTVAP |
| | | TECS |
| 15103 | 24 | MDMRVPAQLLGLLLLWLRGARCESVLTQPPSVS |
| | | GAPGQRVTISCTGSSSNIGAGYDVHWYQQLPGT |
| | | APKLLISGNSNRPSGVPDRFSGSKSGTSASLAITG |
| | | LQAEDEADYYCQSYDSSLSGSVFGGGTKLTVLG |
| | | QPKAAPSVTLFPPSSEELQANKATLVCLISDFYPG |
| | | AVTVAWKADSSPVKAGVETTTPSKQSNNKYAA |
| | | SSYLSLTPEQWKSHRSYSCQVTHEGSTVEKTVAP |
| | | TECS |
| 15104 | 25 | MDMRVPAQLLGLLLLWLRGARCESVLTQPPSVS |
| | | GAPGQRVTISCTGSSSNIGAGYDVHWYQQLPGT |
| | | APKLLISGNSNRPSGVPDRESGSKSGTSASLAITG |
| | | LQAEDEADYYCQSYDSSLSGSVFGGGTKLTVLG |
| | | QPKAAPSVTLFPPSSEELQANKATLVCLISDFYPG |
| | | AVTVAWKADSSPVKAGVETTTPSKQSNNKYAA |
| | | SSYLSLTPEQWKSHRSYSCQVTHEGSTVEKTVAP |
| | | TECS |
| 15105 | 26 | MDMRVPAQLLGLLLLWLRGARCESVLTQPPSVS |
| | | GAPGQRVTISCTGSSSNIGAGYDVHWYQQLPGT |
| | | APKLLISGNSNRPSGVPDRFSGSKSGTSASLAITG |
| | | LQAEDEADYYCQSYDSSLSGSVFGGGTKLTVLG |
| | | QPKAAPSVTLFPPSSEELQANKATLCLISDFYPG |
| | | AVTVAWKADSSPVKAGVETTTPSKQSNNKYAA |
| | | SSYLSLTPEQWKSHRSYSCQVTHEGSTVEKTVAP |
| | | TECS |
| 15106 | 27 | MDMRVPAQLLGLLLLWLRGARCESVLTQPPSVS |
| | | GAPGQRVTISCTGSSSNIGAGYDVHWYQQLPGT |
| | | APKLLISGNSNRPSGVPDRFSGSKSGTSASLAITG |
| | | LQAEDEADYYCQSYDSSLSGSVFGGGTKLTVLG |
| | | QPKAAPSVTLFPPSSEELQANKATLVCLISDFYPG |
| | | AVTVAWKADSSPVKAGVETTTPSKQSNNKYAA |
| | | SSYLSLTPEQWKSHRSYSCQVTHEGSTVEKTVAP |
| | | TECS |
| 15108 | 28 | MDMRVPAQLLGLLLLWLRGARCESVLTQPPSVS |
| | | GAPGQRVTISCTGSSSNIGAGYDVHWYQQLPGT |
| | | APKLLISGNSNRPSGVPDRFSGSKSGTSASLAITG |
| | | LQAEDEADYYCQSYDSSLSGSVFGGGTKLTVLG |
| | | QPKAAPSVTLFPPSSEELQANKATLVCLISDFYPG |
| | | AVTVAWKADSSPVKAGVETTTPSKQSNNKYAA |
| | | SSYLSLTPEQWKSHRSYSCQVTHEGSTVEKTVAP |
| | | TECS |
| 15112 | 29 | MDMRVPAQLLGLLLLWLRGARCESVLTQPPSVS |
| | | GAPGQRVTISCTGSSSNIGAGYDVHWYQQLPGT |
| | | APKLLISGNSNRPSGVPDRFSGSKSGTSASLAITG |
| | | LQAEDEADYYCQSYDSSLSGSVFGGGTKLTVLG |
| | | QPKAAPSVTLFPPSSEELQANKATLVCLISDFYPG |
| | | AVTVAWKADSSPVKAGVETTTPSKQSNNKYAA |
| | | SSYLSLTPEQWKSHRSYSCQVTHEGSTVEKTVAP |
| | | TECS |
| 15113 | 30 | MDMRVPAQLLGLLLLWLRGARCESVLTQPPSVS |
| | | GAPGQRVTISCTGSSSNIGAGYDVHWYQQLPGT |
| | | APKLLISGNSNRPSGVPDRFSGSKSGTSASLAITG |
| | | LQAEDEADYYCQSYDSSLSGSVFGGGTKLTVLG |
| | | QPKAAPSVTLFPPSSEELQANKATLVCLISDFYPG |
| | | AVTVAWKADSSTVKAGVETTTPSKQSNNKYAA |
| | | SSYLSLTPEQWKSHRSYSCQVTHEGSTVEKTVAP |
| | | TECS |
| 15114 | 31 | MDMRVPAQLLGLLLLWLRGARCESVLTQPPSVS |
| | | GAPGQRVTISCTGSSSNIGAGYDVHWYQQLPGT |
| | | APKLLISGNSNRPSGVPDRFSGSKSGTSASLAITG |
| | | LQAEDEADYYCQSYDSSLSGSVFGGGTKLTVLG |
| | | QPKAAPSVTLFPPSSEELQANKATLVCLISDFYPG |
| | | AVTVAWKADSSPVKAGVETTTPSKQSNNKYAA |
| | | SSYLSLTPEQWKSHRSYSCQVTHEGSTVEKTVAP |
| | | TECS |
| 15117 | 32 | MDMRVPAQLLGLLLLWLRGARCESVLTQPP |
| | | SVSGAPGQRVTISCTGSSSNIGAGYDVHWYQ |
| | | QLPGTAPKLLISGNSNRPSGVPDRFSGSKSGT |
| | | SASLASITGLQAEDEADYYCQSYDSSLSGSVF |
| | | GGGTKLTVLGQPKAAPSVTLFPPSSEELQAN |
| | | KATLVCLISDFYPGAVTVAWKADSSPVKAG |
| | | VETTTPSKQSNNKYAASSYLSLTPEQWKSHR |
| | | SYSCQVTHEGSTVEKTVAPTECS |
| 15121 | 33 | MDMRVPAQLLGLLLLWLRGARCESVLTQPPSVS |
| | | GAPGQRVTISCTGSSSNIGAGYDVHWYQQLPGT |
| | | APKLLISGNSNRPSGVPDRFSGSKSGTSASLAITG |
| | | LQAEDEADYYCQSYDSSLSGSVFGGGTKLTVLG |
| | | QPKAAPSVTLFPPSSEELQANKATLVCLISDFYPG |
| | | AVTVAWKADSSPVKAGVETTTPSKQSNNKYAA |
| | | SSYLSLTPEQWKSHRSYSCQVTHEGSTVEKTVAP |
| | | TECS |
| 15123 | 34 | MDMRVPAQLLGLLLLWLRGARCESVLTQPPSVS |
| | | GAPGQRVTISCTGSSSNIGAGYDVHWYQQLPGT |
| | | APKLLISGNSNRPSGVPDRFSGSKSGTSASLAITG |
| | | LQAEDEADYYCQSYDSSLSGSVFGGGTKLTVLG |
| | | QPKAAPSVTLFPPSSEELQANKATLVCLISDFYPG |
| | | AVWAWKADSSPVKAGVETTTPSKQSNNKYAA |
| | | SSYLSLTPEQWKSHRSYSCQVTHEGSTVEKTVAP |
| | | TECS |
| 15124 | 35 | MDMRVPAQLLGLLLLWLRGARCESVLTQPPSVS |
| | | GAPGQRVTISCTGSSSNIGAGYDVHWYQQLPGT |
| | | APKLLISGNSNRPSGVPDRFSGSKSGTSASLAITG |
| | | LQAEDEADYYCQSYDSSLSGSVFGGGTKLTVLG |
| | | QPKAAPSVTLFPPSSEELQANKATLVCLISDFYPG |
| | | AVTVAWKADSSPVKAGVETTTPSKQSNNKYAA |
| | | SSYLSLTPEQWKSHRSYSCQVTHEGSTVEKTVAP |
| | | TECS |
| 15126 | 36 | MDMRVPAQLLGLLLLWLRGARCESVLTQPPSVS |
| | | GAPGQRVTISCTGSSSNIGAGYDVHWYQQLPGT |
| | | APKLLISGNSNRPSGVPDRFSGSKSGTSASLAITG |
| | | LQAEDEADYYCQSYDSSLSGSVFGGGTKLTVLG |
| | | QPKAAPSVTLFPPSSEELQANKATLVCLISDFYPG |
| | | AVTVAWKADSSPVKAGVETTTPSKQSNNKYAA |
| | | SSYLSLTPEQWKSHRSYSCQVTHEGSTVEKTVAP |
| | | TECS |
| 15132 | 37 | MDMRVPAQLLGLLLLWLRGARCESVLTQPPSVS |
| | | GAPGQRVTISCTGSSSNIGAGYDVHWYQQLPGT |
| | | APKLLISGNSNRPSGVPDRFSGSKSGTSASLAITG |
| | | LQAEDEADYYCQSYDSSLSGSVFGGGTKLTVLG |
| | | QPKAAPSVTLFPPSSEELQANKATLVCLISDFYPG |
| | | AVTVAWKADSSPVKAGVETTTPSKQSNNKYAA |
| | | SSYLSLTPEQWKSHRSYSCQVTHEGSTVEKTVAP |
| | | TECS |
| 15133 | 38 | MDMRVPAQLLGLLLLWLRGARCESVLTQPPSVS |
| | | GAPGQRVTISCTGSSSNIGAGYDVHWYQQLPGT |
| | | APKLLISGNSNRPSGVPDRFSGSKSGTSASLAITG |
| | | LQAEDEADYYCQSYDSSLSGSVFGGGTKLTVLG |
| | | QPKAAPSVTLFPPSSEELQANKATLVCLISDFYPG |
| | | AVTVAWKADSSPVKAGVETTTPSKQSNNKYAA |
| | | SSYLSLTPEQWKSHRSYSCQVTHEGSTVEKTVAP |
| | | TECS |
| 15136 | 39 | MDMRVPAQLLGLLLLWLRGARCESVLTQPPSVS |
| | | GAPGQRVTISCTGSSSNIGAGYDVHWYQQLPGT |
| | | APKLLISGNSNRPSGVPDRFSGSKSGTSASLAITG |
| | | LQAEDEADYYCQSYDSSLSGSVFGGGTKLTVLG |
| | | QPKAAPSVTLFPPSSEELQANKATLVCLISDFYPG |
| | | AVTVAWKADSSPVKAGVETTTPSKQSNNKYAA |
| | | SSYLSLTPEQWKSHRSYSCQVTHEGSTVEKTVAP |
| | | TECS |
| 15139 | 40 | MDMRVPAQLLGLLLLWLRGARCESVLTQPPSVS |
| | | GAPGQRVTISCTGSSSNIGAGYDVHWYQQLPGT |
| | | APKLLISGNSNRPSGVPDRFSGSKSGTSASLAITG |
| | | LQAEDEADYYCQSYDSSLSGSVFGGGTKLTVLG |
| | | QPKAAPSVTLFPPSSEELQANKATLVCLISDFYPG |
| | | AVTVAWKADSSPVKAGVETTTPSKQSNNKYAA |
| | | SSYLSLTPEQWKSHRSYSCQVTHEGSTVEKTVAP |
| | | TECS |
| 15140 | 41 | MDMRVPAQLLGLLLLWLRGARCESVLTQPPSVS |
| | | GAPGQRVTISCTGSSSNIGAGYDVHWYQQLPGT |
| | | APKLLISGNSNRPSGVPDRFSGSKSGTSASLAITG |
| | | LQAEDEADYYCQSYDSSLSGSVFGGGTKLTVLG |
| | | QPKAAPSVTLFPPSSEELQANKATLVCLISDFYPG |
| | | AVTVAWKADSSPVKAGVETTTPSKQSNNKYAA |
| | | SSYLSLTPEQWKSHRSYSCQVTHEGSTVEKTVAP |
| | | TECS |
| 15141 | 42 | MDMRVPAQLLGLLLLWLRGARCESVLTQPPSVS |
| | | GAPGQRVTISCTGSSSNIGAGYDVHWYQQLPGT |
| | | APKLLISGNSNRPSGVPDRFSGSKSGTSASLAITG |
| | | LQAEDEADYYCQSYDSSLSGSVFGGGTKLTVLG |
| | | QPKAAPSVTLFPPSSEELQANKATLVCLISDFYPG |
| | | AVTVAWKADSSPVKAGVETTTPSKQSNNKYAA |
| | | SSYLSLTPEQWKSHRSYSCQVTHEGSTVEKTVAP |
| | | TECS |
| SS-13983 | 43 | MDMRVPAQLLGLLLLWLRGARCDIVMTQSPLSL |
| A01 | | PVTPGEPASISCRSSQSLLHSNGHNYLDWYLQKP |
| | | GQSPQLLIYLGLNRASGVPDRFSGSGSGTDFTLKI |
| | | SRVEAEDVGVYYCMQALQTPLTFGGGTKVEIKR |
| | | TVAAPSVFIFPPSDEQLKSGTASVVCLLNNFYPRE |
| | | AKVQWKVDNALQSGNSQESVTEQDSKDSTYSLS |
| | | STLTLSKADYEKHKVYACEVTHQGLSSPVTKSF |
| | | NRGEC |
| SS-13991 | 44 | MDMRVPAQLLGLLLLWLRGARCDIVMTQSPLSL |
| A02 | | PVTPGEPASISCRSSQSLLHSNGHNYLDWYLQKP |
| | | GQSPQLLIYLGLNRAHGVPDRFSGSGSGTDFTLKI |
| | | SRVEAEDVGVYYCMQALQTPLTFGGGTKVEIKR |
| | | TVAAPSVFIFPPSDEQLKSGTASVVCLLNNFYPRE |
| | | AKVQWKVDNALQSGNSQESVTEQDSKDSTYSLS |
| | | STLTLSKADYEKHKVYACEVTHQGLSSPVTKSF |
| | | NRGEC |
| SS-13993 | 45 | MDMRVPAQLLGLLLLWLRGARCDIVMTQSPLSL |
| C02 | | PVTPGEPASISCRSSQSLLHSNGHNYLDWYLQKP |
| | | GQSPQLLIYLGLNRASGVPDRFSGSGHGTDFTLKI |
| | | SRVEAEDVGVYYCMQALQTPLTFGGGTKVEIKR |
| | | TVAAPSVFIFPPSDEQLKSGTASVVCLLNNFYPRE |
| | | AKVQWKVDNALQSGNSQESVTEQDSKDSTYSLS |
| | | STLTLSKADYEKHKVYACEVTHQGLSSPVTKSF |
| | | NRGEC |
| SS-12685 | 46 | MDMRVPAQLLGLLLLWLRGARCDIVMTQSPLSL |
| P1B1 | | PVTPGEPASISCRSSQSLLHSYGYNYLDWYLQKP |
| | | GQSPQLLIYLGSNRASGVPDRFSGSGSGTDFTLKI |
| | | SRVEAEDVGVYYCMQALQTPLTFGGGTKVEIKR |
| | | TVAAPSVFIFPPSDEQLKSGTASVVCLLNNFYPRE |
| | | AKVQWKVDNALQSGNSQESVTEQDSKDSTYSLS |
| | | STLTLSKADYEKHKVYACEVTHQGLSSPVTKSF |
| | | NRGEC |
| SS-12686 | 47 | MDMRVPAQLLGLLLLWLRGARCDIVMTQSPLSL |
| P2F5 | | PVTPGEPASISCRSSQSLLHSFGYNYLDWYLQKP |
| | | GQSPQLLIYLGSNRASGVPDRFSGSGSGTDFTLKI |
| | | SRVEAEDVGVYYCMQALQTPLTFGGGTKVEIKR |
| | | TVAAPSVFIFPPSDEQLKSGTASVVCLLNNFYPRE |
| | | AKVQWKVDNALQSGNSQESVTEQDSKDSTYSLS |
| | | STLTLSKADYEKHKVYACEVTHQGLSSPVTKSF |
| | | NRGEC |
| SS-12687 | 48 | MDMRVPAQLLGLLLLWLRGARCDIVMTQSPLSL |
| P2C6 | | PVTPGEPASISCRSSQSLLHSNGYNYLDWYLQKP |
| | | GQSPQLLIYLGLNRASGVPDRFSGSGSGTDFTLKI |
| | | SRVEAEDVGVYYCMQALQTPLTFGGGTKVEIKR |
| | | TVAAPSVFIFPPSDEQLKSGTASVVCLLNNFYPRE |
| | | AKVQWKVDNALQSGNSQESVTEQDSKDSTYSLS |
| | | STLTLSKADYEKHKVYACEVTHQGLSSPVTKSF |
| | | NRGEC |
| SS-14892 | 49 | MDMRVPAQLLGLLLLWLRGARCDIVMTQSPLSL |
| P2F5/P2C6 | | PVTPGEPASISCRSSQSLLHSFGYNYLDWYLQKP |
| | | GQSPQLLIYLGLNRASGVPDRFSGSGSGTDFTLKI |
| | | SRVEAEDVGVYYCMQALQTPLTFGGGTKVEIKR |
| | | TVAAPSVFIFPPSDEQLKSGTASVVCLLNNFYPRE |
| | | AKVQWKVDNALQSGNSQESVTEQDSKDSTYSLS |
| | | STLTLSKADYEKHKVYACEVTHQGLSSPVTKSF |
| | | NRGEC |
| SS-15509 | 50 | MDMRVPAQLLGLLLLWLRGARCDIVMTQSPLSL |
| | | PVTPGEPASISCRSSQSLLHSFGYNYLDWYLQKP |
| | | GQSPQLLIYLGMNRASGVPDRFSGSGSGTDFTLK |
| | | ISRVEAEDVGVYYCMQALQTPLTFGGGTKVEIK |
| | | RTVAAPSVFIFPPSDEQLKSGTASVVCLLNNFYPR |
| | | EAKVQWKVDNALQSGNSQESVTEQDSKDSTYSL |
| | | SSTLTLSKADYEKHKVYACEVTHQGLSSPVTKSF |
| | | NRGEC |
| SS-15510 | 51 | MDMRVPAQLLGLLLLWLRGARCDIVMTQSPLSL |
| | | PVTPGEPASISCRSSQSLLHSFGYNYLDWYLQKP |
| | | GQSPQLLIYLGFNRASGVPDRFSGSGSGTDFTLKI |
| | | SRVEAEDVGVYYCMQALQTPLTFGGGTKVEIKR |
| | | TVAAPSVFIFPPSDEQLKSGTASVVCLLNNFYPRE |
| | | AKVQWKVDNALQSGNSQESVTEQDSKDSTYSLS |
| | | STLTLSKADYEKHKVYACEVTHQGLSSPVTKSF |
| SS-15511 | 52 | MDMRVPAQLLGLLLLWLRGARCDIVMTQSPLSL |
| | | PVTPGEPASISCRSSQSLLHSFGYNYLDWTYLQKP |
| | | GQSPQLLIYLGHNRASGVPDRFSGSGSGTDFTLKI |
| | | SRVEAEDVGVYYCMQALQTPLTFGGGTKVEIKR |
| | | TVAAPSVFIFPPSDEQLKSGTASVVCLLNNFYPRE |
| | | AKVQWKVDNALQSGNSQESVTEQDSKDSTYSLS |
| | | STLTLSKADYEKHKVYACEVTHQGLSSPVTKSF |
| | | NRGEC |
| SS-15512 | 53 | MDMRVPAQLLGLLLLWLRGARCDIVMTQSPLSL |
| | | PVTPGEPASISCRSSQSLLHSFGYNYLDWYLQKP |
| | | GQSPQLLIYLGNNRASGVPDRFSGSGSGTDFTLKI |
| | | SRVEAEDVGVYYCMQALQTPLTFGGGTKVEIKR |
| | | TVAAPSVFIFPPSDEQLKSGTASVVCLLNNFYPRE |
| | | AKVQWKVDNALQSGNSQESVTEQDSKDSTYSLS |
| | | STLTLSKADYEKHKVYACEVTHQGLSSPVTKSF |
| | | NRGEC |
| SS-15513 | 54 | MDMRVPAQLLGLLLLWLRGARCDIVMTQSPLSL |
| | | PVTPGEPASISCRSSQSLLHSFGYNYLDWYLQKP |
| | | GQSPQLLIYLGWNRASGVPDRFSGSGSGTDFTLK |
| | | ISRVEAEDVGVYYCMQALQTPLTFGGGTKVEIK |
| | | RTVAAPSVFIFPPSDEQLKSGTASVVCLLNNFYPR |
| | | EAKVQWKVDNALQSGNSQESVTEQDSKDSTYSL |
| | | SSTLTLSKADYEKHKVYACEVTHQGLSSPVTKSF |
| | | NRGEC |
| SS-15514 | 55 | MDMRVPAQLLGLLLLWLRGARCDIVMTQSPLSL |
| | | PVTPGEPASISCRSSQSLLHSFGYNYLDWYLQKP |
| | | GQSPQLLIYLGQNRASGVPDRFSGSGSGTDFTLKI |
| | | SRVEAEDVGVYYCMQALQTPLTFGGGTKVEIKR |
| | | TVAAPSVFIFPPSDEQLKSGTASVVCLLNNFYPRE |
| | | AKVQWKVDNALQSGNSQESVTEQDSKDSTYSLS |
| | | STLTLSKADYEKHKVYACEVTHQGLSSPVTKSF |
| | | NRGEC |
| SS-15497 | 56 | MDMRVPAQLLGLLLLWLRGARCDIVMTQSPLSL |
| | | PVTPGEPASISCRSSQSLLHSGNGYNYLDWYLQK |
| | | PGQSPQLLIYLGLNRASGVPDRFSGSGSGTDFTL |
| | | KISRVEAEDVGVYYCMQAIHTPLTFGGGTKVEIK |
| | | RTVAAPSVFIFPPSDEQLKSGTASVVCLLNNFYPR |
| | | EAKVQWKVDNALQSGNSQESVTEQDSKDSTYSL |
| | | SSTLTLSKADYEKHKVYACEVTHQGLSSPVTKSF |
| | | NRGEC |
| SS-15515 | 57 | MGSTAILGLLLAVLQGGRADIVMTQSPLSLPVTP |
| | | GEPASISCRSSQSLLHSGNGYNYLDWYLQKPGQS |
| | | PQLLIYLGMNRASGVPDRFSGSGSGTDFTLKISR |
| | | VEAEDVGVYYCMQAIHTPLTFGGGTKVEIKRTV |
| | | AAPSVFIFPPSDEQLKSGTASVVCLLNNFYPREAK |
| | | VQWKVDNALQSGNSQESVTEQDSKDSTYSLSST |
| | | LTLSKADYEKHKVYACEVTHQGLSSPVTKSFNR |
| | | GEC |
| SS-15516 | 58 | MGSTAILGLLLAVLQGGRADIVMTQSPLSLPVTP |
| | | GEPASISCRSSQSLLHSGNGYNYLDWYLQKPGQS |
| | | PQLLIYLGFNRASGVPDRFSGSGSGTDFTLKISRV |
| | | EAEDVGVYYCMQAIHTPLTFGGGTKVEIKRTVA |
| | | APSVFIFPPSDEQLKSGTASVVCLLNNFYPREAKV |
| | | QWKVDNALQSGNSQESVTEQDSKDSTYSLSSTL |
| | | TLSKADYEKHKVYACEVTHQGLSSPVTKSFNRG |
| | | EC |
| SS-15517 | 59 | MGSTAILGLLLAVLQGGRADIVMTQSPLSLPVTP |
| | | GEPASISCRSSQSLLHSGNGYNYLDWYLQKPGQS |
| | | PQLLIYLGHNRASGVPDRFSGSGSGTDFTLKISRV |
| | | EAEDVGVYYCMQAIHTPLTFGGGTKVEIKRTVA |
| | | APSVFIFPPSDEQLKSGTASVVCLLNNFYPREAKV |
| | | QWKVDNALQSGNSQESVTEQDSKDSTYSLSSTL |
| | | TLSKADYEKHKVYACEVTHQGLSSPVTKSFNRG |
| | | EC |
| SS-15518 | 60 | MGSTAILGLLLAVLQGGRADIVMTQSPLSLPVTP |
| | | GEPASISCRSSQSLLHSGNGYNYLDWYLQKPGQS |
| | | PQLLIYLGNNRASGVPDRFSGSGSGTDFTLKISRV |
| | | EAEDVGVYYCMQAIHTPLTFGGGTKVEIKRTVA |
| | | APSVFIFPPSDEQLKSGTASVVCLLNNFYPREAKV |
| | | QWKVDNALQSGNSQESVTEQDSKDSTYSLSSTL |
| | | TLSKADYEKHKVYACEVTHQGLSSPVTKSFNRG |
| | | EC |
| SS-15519 | 61 | MGSTAILGLLLAVLQGGRADIVMTQSPLSLPVTP |
| | | GEPASISCRSSQSLLHSGNGYNYLDWYLQKPGQS |
| | | PQLLIYLGWNRASGVPDRFSGSGSGTDFTLKISR |
| | | VEAEDVGVYYCMQAIHTPLTFGGGTKVEIKRTV |
| | | AAPSVFIFPPSDEQLKSGTASVVCLLNNFYPREAK |
| | | VQWKVDNALQSGNSQESVTEQDSKDSTYSLSST |
| | | LTLSKADYEKHKVYACEVTHQGLSSPVTKSFNR |
| | | GEC |
| SS-15520 | 62 | MGSTAILGLLLAVLQGGRADIVMTQSPLSLPVTP |
| | | GEPASISCRSSQSLLHSGNGYNYLDWYLQKPGQS |
| | | PQLLIYLGQNRASGVPDRFSGSGSGTDFTLKISRV |
| | | EAEDVGVYYCMQAIHTPLTFGGGTKVEIKRTVA |
| | | APSVFIFPPSDEQLKSGTASVVCLLNNFYPREAKV |
| | | QWKVDNALQSGNSQESVTEQDSKDSTYSLSSTL |
| | | TLSKADYEKHKVYACEVTHQGLSSPVTKSFNRG |
| | | EC |
| SS-15522 | 63 | MDMRVPAQLLGLLLLWLRGARCDIVMTQSPLSL |
| | | PVTPGEPASISCRSSQSLLHSNGYNYLDWYLQKP |
| | | GQSPQLLIYLGLARASGVPDRFSGSGSGTDFTLKI |
| | | SRVEAEDVGVYYCMQALQTPLTFGGGTKVEIKR |
| | | TVAAPSVFIFPPSDEQLKSGTASVVCLLNNFYPRE |
| | | AKVQWKVDNALQSGNSQESVTEQDSKDSTYSLS |
| | | STLTLSKADYEKHKVYACEVTHQGLSSPVTKSF |
| | | NRGEC |
| SS-15524 | 64 | MDMRVPAQLLGLLLLWLRGARCDIVMTQSPLSL |
| | | PVTPGEPASISCRSSQSLLHSNGYNYLDWYLQKP |
| | | GQSPQLLIYLGLARASGVPDRFSGSGSGTDFTLKI |
| | | SRVEAEDVGVYYCMQALQTPLTFGGGTKVEIKR |
| | | TVAAPSVFIFPPSDEQLKSGTASVVCLLNNFYPRE |
| | | AKVQWKVDNALQSGNSQESVTEQDSKDSTYSLS |
| | | STLTLSKADYEKHKVYACEVTHQGLSSPVTKSF |
| | | NRGEC |
| SS-14835 | 65 | MDMRVPAQLLGLLLLWLRGARCDIVMTQSPLSL |
| | | PVTPGEPASISCRSSQSLLHSGNGYNYLDWYLQK |
| | | PGQSPQLLIYLGLNRASGVPDRFSGSGSGTDFTL |
| | | KISRVEAEDVGVYYCMQAIHTPLTFGGGTKVEIK |
| | | RTVAAPSVFIFPPSDEQLKSGTASVVCLLNNFYPR |
| | | EAKVQWKVDNALQSGNSQESVTEQDSKDSTYSL |
| | | SSTLTLSKADYEKHKVYACEVTHQGLSSPVTKSF |
| | | NRGEC |
| SS-15194 | 66 | MDMRVPAQLLGLLLLWLRGARCDIVMTQSPLSL |
| | | PVTPGEPASISCRSSQSLLHSNGHNYLDWYLQKP |
| | | GQSPQLLIYLGLNRASGVPDRFSGSGSGTDFTLKI |
| | | SRVEAEDVGVYYCMQALQTPLTFGGGTKVEIKR |
| | | TVAAPSVFIFPPSDEQLKSGTASVVCLLNNFYPRE |
| | | AKVQWKVDNALQSGNSQESVTEQDSKDSTYSLS |
| | | STLTLSKADYEKHKVYACEVTHQGLSSPVTKSF |
| | | NRGEC |
| SS-15195 | 67 | MDMRVPAQLLGLLLLWLRGARCDIVMTQSPLSL |
| | | PVTPGEPASISCRSSQSLLHSNGHNYLDWYLQKP |
| | | GQSPQLLIYLGLNRAHGVPDRFSGSGSGTDFTLKI |
| | | SRVEAEDVGVYYCMQALQTPLTFGGGTKVEIKR |
| | | TVAAPSVFIFPPSDEQLKSGTASVVCLLNNFYPRE |
| | | AKVQWKVDNALQSGNSQESVTEQDSKDSTYSLS |
| | | STLTLSKADYEKHKVYACEVTHQGLSSPVTKSF |
| | | NRGEC |
| SS-15196 | 68 | MDMRVPAQLLGLLLLWLRGARCDIVMTQSPLSL |
| | | PVTPGEPASISCRSSQSLLHSGNGYNYLDWYLQK |
| | | PGQSPQLLIYLGLNRASGVPDRFSGSGSGTDFTL |
| | | KISRVEAEDVGVYYCMQAIHTPLTFGGGTKVEIK |
| | | RTVAAPSVFIFPPSDEQLKSGTASVVCLLNNFYPR |
| | | EAKVQWKVDNALQSGNSQESVTEQDSKDSTYSL |
| | | SSTLTLSKADYEKHKVYACEVTHQGLSSPVTKSF |
| | | NRGEC |
| SS-14894 | 69 | MDMRVPAQLLGLLLLWLRGARCDIVMTQSPLSL |
| | | PVTPGEPASISCRSSQSLLHSGNGYNYLDWYLQK |
| | | PGQSPQLLIYLGLNRASGVPDRFSGSGSGTDFTL |
| | | KISRVEAEDVGVYYCMQALQTPLTFGGGTKVEI |
| | | KRTVAAPSVFIFPPSDEQLKSGTASVVCLLNNFYP |
| | | REAKVQWKVDNALQSGNSQESVTEQDSKDSTY |
| | | SLSSTLTLSKADYEKHKVYACEVTHQGLSSPVTK |
| | | SFNRGEC |
| SS-15504 | 70 | MDMRVPAQLLGLLLLWLRGARCDIVMTQSPLSL |
| | | PVTPGEPASISCRSSQSLLHSNGHNYLDWYLQKP |
| | | GQSPQLLIYLGLNRAHGVPDRFSGSGSGTDFTLKI |
| | | SRVEAEDVGVYYCMQALQTPLTFGGGTKVEIKR |
| | | TVAAPSVFIFPPSDEQLKSGTASVVCLLNNFYPRE |
| | | AKVQWKVDNALQSGNSQESVTEQDSKDSTYSLS |
| | | STLTLSKADYEKHKVYACEVTHQGLSSPVTKSF |
| | | NRGEC |
| SS-15494 | 71 | MDMRVPAQLLGLLLLWLRGARCDIVMTQSPLSL |
| | | PVTPGEPASISCRSSQSLLHSFGYNYLDWYLQKP |
| | | GQSPQLLIYLGLNRASGVPDRFSGSGSGTDFTLKI |
| | | SRVEAEDVGVYYCMQALQTPLTFGGGTKVEIKR |
| | | TVAAPSVFIFPPSDEQLKSGTASVVCLLNNFYPRE |
| | | AKVQWKVDNALQSGNSQESVTEQDSKDSTYSLS |
| | | STLTLSKADYEKHKVYACEVTHQGLSSPVTKSF |
| | | NRGEC |
| SS-14892 | 72 | DIVMTQSPLSLPVTPGEPASISCRSSQSLLHSF |
| | | GYNYLDWYLQKPGQSPQ |
| | | LLIYLGLNRASGVPDRFSGSGSGTDFTLKISR |
| | | VEAEDVGVYYCMQALQTP |
| | | LTFGGGTKVEIKRTVAAPSVFIFPPSDEQLKS |
| | | GTASVVCLLNNFYPREAK |
| | | VQWKVDNALQSGNSQESVTEQDSKDSTYSL |
| | | SSTLTLSKADYEKHKVYACE |
| | | VTHQGLSSPVTKSFNRGEC |
| SS-15495 | 73 | MDMRVPAQLLGLLLLWLRGARCDIVMTQSPLSL |
| | | PVTPGEPASISCRSSQSLLHSFGHNYLDWYLQKP |
| | | GQSPQLLIYLGLNRAHGVPDRFSGSGSGTDFTLKI |
| | | SRVEAEDVGVYYCMQALQTPLTFGGGTKVEIKR |
| | | TVAAPSVFIFPPSDEQLKSGTASVVCLLNNFYPRE |
| | | AKVQWKVDNALQSGNSQESVTEQDSKDSTYSLS |
| | | STLTLSKADYEKHKVYACEVTHQGLSSPVTKSF |
| | | NRGEC |
| SS-15496 | 74 | MDMRVPAQLLGLLLLWLRGARCDIVMTQSPLSL |
| | | PVTPGEPASISCRSSQSLLHSFGHNYLDWYLQKP |
| | | GQSPQLLIYLGLNRAHGVPDRFSGSGSGTDFTLKI |
| | | SRVEAEDVGVYYCMQALQTPLTFGGGTKVEIKR |
| | | TVAAPSVFIFPPSDEQLKSGTASVVCLLNNFYPRE |
| | | AKVQWKVDNALQSGNSQESVTEQDSKDSTYSLS |
| | | STLTLSKADYEKHKVYACEVTHQGLSSPVTKSF |
| | | NRGEC |
| SS-15497 | 75 | MDMRVPAQLLGLLLLWLRGARCDIVMTQSPLSL |
| | | PVTPGEPASISCRSSQSLLHSGNGYNYLDWYLQK |
| | | PGQSPQLLIYLGLNRASGVPDRFSGSGSGTDFTL |
| | | KISRVEAEDVGVYYCMQAIHTPLTFGGGTKVEIK |
| | | RTVAAPSVFIFPPSDEQLKSGTASVVCLLNNFYPR |
| | | EAKVQWKVDNALQSGNSQESVTEQDSKDSTYSL |
| | | SSTLTLSKADYEKHKVYACEVTHQGLSSPVTKSF |
| | | NRGEC |
| SS-15503 | 76 | MDMRVPAQLLGLLLLWLRGARCDIVMTQSP |
| | | LSLPVTPGEPASISCRSSQSLLHSFGYNYLDW |
| | | YLQKPGQSPQLLIYLGLNRASGVPDRFSGSG |
| | | SGTDFTLKISRVEAEDVGVYYCMQALQTPLT |
| | | FGGGTKVEIKRTVAAPSVFIFPPSDEQLKSGT |
| | | ASVVCLLNNFYPREAKVQWKVDNALQSGN |
| | | SQESVTEQDSKDSTYSLSSTLTLSKADYEKH |
| | | KVYACEVTHQGLSSPVTKSFNRGEC |
| SS-15505 | 77 | MDMRVPAQLLGLLLLWLRGARCDIVMTQSP |
| | | LSLPVTPGEPASISCRSSQSLLHSNGHNYLDW |
| | | YLQKPGQSPQLLIYLGLNRAHGVPDRFSGSG |
| | | SGTDFTLKISRVEAEDVGVYYCMQALQTPLT |
| | | FGGGTKVEIKRTVAAPSVFIFPPSDEQLKSGT |
| | | ASVVCLLNNFYPREAKVQWKVDNALQSGN |
| | | SQESVTEQDSKDSTYSLSSTLTLSKADYEKH |
| | | KVYACEVTHQGLSSPVTKSFNRGEC |
| SS-15506 | 78 | MDMRVPAQLLGLLLLWLRGARCDIVMTQSPLSL |
| | | PVTPGEPASISCRSSQSLLHSNGHNYLDWYLQKP |
| | | GQSPQLLIYLGLNRAHGVPDRFSGSGSGTDFTLKI |
| | | SRVEAEDVGVYYCMQALQTPLTFGGGTKVEIKR |
| | | TVAAPSVFIFPPSDEQLKSGTASVVCLLNNFYPRE |
| | | AKVQWKVDNALQSGNSQESVTEQDSKDSTYSLS |
| | | STLTLSKADYEKHKVYACEVTHQGLSSPVTKSF |
| | | NRGEC |
| SS-15507 | 79 | MDMRVPAQLLGLLLLWLRGARCDIVMTQSPLSL |
| | | PVTPGEPASISCRSSQSLLHSFGYNYLDWYLQKP |
| | | GQSPQLLIYLGLNRASGVPDRFSGSGSGTDFTLKI |
| | | SRVEAEDVGVYYCMQALQTPLTFGGGTKVEIKR |
| | | TVAAPSVFIFPPSDEQLKSGTASVVCLLNNFYPRE |
| | | AKVQWKVDNALQSGNSQESVTEQDSKDSTYSLS |
| | | STLTLSKADYEKHKVYACEVTHQGLSSPVTKSF |
| | | NRGEC |
| SS-15502 | 80 | MDMRVPAQLLGLLLLWLRGARCDIVMTQSPLSL |
| | | PVTPGEPASISCRSSQSLLHSFGYNYLDWYLQKP |
| | | GQSPQLLIYLGLNRASGVPDRFSGSGSGTDFTLKI |
| | | SRVEAEDVGVYYCMQALQTPLTFGGGTKVEIKR |
| | | TVAAPSVFIFPPSDEQLKSGTASVVCLLNNFYPRE |
| | | AKVQWKVDNALQSGNSQESVTEQDSKDSTYSLS |
| | | STLTLSKADYEKHKVYACEVTHQGLSSPVTKSF |
| | | NRGEC |
| SS-15508 | 81 | MDMRVPAQLLGLLLLWLRGARCDIVMTQSPLSL |
| | | PVTPGEPASISCRSSQSLLHSFGHNYLDWYLQKP |
| | | GQSPQLLIYLGLNRAHGVPDRFSGSGSGTDFTLKI |
| | | SRVEAEDVGVYYCMQALQTPLTFGGGTKVEIKR |
| | | TVAAPSVFIFPPSDEQLKSGTASVVCLLNNFYPRE |
| | | AKVQWKVDNALQSGNSQESVTEQDSKDSTYSLS |
| | | STLTLSKADYEKHKVYACEVTHQGLSSPVTKSF |
| | | NRGEC |
| SS-15501 | 82 | MDMRVPAQLLGLLLLWLRGARCDIVMTQSPLSL |
| | | PVTPGEPASISCRSSQSLLHSYGHNYLDWYLQKP |
| | | GQSPQLLIYLGLNRAHGVPDRFSGSGSGTDFTLKI |
| | | SRVEAEDVGVYYCMQALQTPLTFGGGTKVEIKR |
| | | TVAAPSVFIFPPSDEQLKSGTASVVCLLNNFYPRE |
| | | AKVQWKVDNALQSGNSQESVTEQDSKDSTYSLS |
| | | STLTLSKADYEKHKVYACEVTHQGLSSPVTKSF |
| | | NRGEC |
| SS-15500 | 83 | MDMRVPAQLLGLLLLWLRGARCDIVMTQSPLSL |
| | | PVTPGEPASISCRSSQSLLHSYGHNYLDWYLQKP |
| | | GQSPQLLIYLGLNRAHGVPDRFSGSGSGTDFTLKI |
| | | SRVEAEDVGVYYCMQALQTPLTFGGGTKVEIKR |
| | | TVAAPSVFIFPPSDEQLKSGTASVVCLLNNFYPRE |
| | | AKVQWKVDNALQSGNSQESVTEQDSKDSTYSLS |
| | | STLTLSKADYEKHKVYACEVTHQGLSSPVTKSF |
| | | NRGEC |
| SS-15003 | 84 | MDMRVPAQLLGLLLLWLRGARCESVLTQPPSVS |
| | | AAPGQKVTISCSGSSSNIGNNFVSWYQQLPGTAP |
| | | KLLIYDYNKRPSGIPDRFSGSKSGTSATLGITGLQ |
| | | TGDEADYYCGTWDSSLSAYVFGTGTRVTVLGQP |
| | | KAAPSVTLFPPSSEELQANKATLVCLISDFYPGAV |
| | | TVAWKADSSPVKAGVETTTPSKQSNNKYAASSY |
| | | LSLTPEQWKSHRSYSCQVTHEGSTVEKTVAPTECS |
| SS-15005 | 85 | MGSTAILGLLLAVLQGGRADIQMTQSPSSLSASV |
| | | GDRVTITCRASQSISIYLNWYQQKPGKAPYLLIY |
| | | AAASLQSGVPSRFSGSGSGTDFTLTISSLQPEDFA |
| | | TYYCQQSYSAPITFGQGTRLEIKRTVAAPSVFIFP |
| | | PSDEQLKSGTASVVCLLNNFYPREAKVQWKVDN |
| | | ALQSGNSQESVTEQDSKDSTYSLSSTLTLSKADY |
| | | EKHKVYACEVTHQGLSSPVTKSFNRGEC |
| SS-15757 | 86 | MDMRVPAQLLGLLLLWLRGARCDIVNITQSPLSL |
| (P1F4) | | PVTPGEPASISCRSSQSLLHSNGYNYLDWYLQKP |
| | | GQSPQLLIYLGSNRASGVPDRFSGSGSGTDFTLKI |
| | | SRVEAEDVGVYYCMQAMQTPLTFGGGTKVEIK |
| | | RTVAAPSVFIFPPSDEQLKSGTASVVCLLNNFYPR |
| | | EAKVQWKVDNALQSGNSQESVTEQDSKDSTYSL |
| | | SSTLTLSKADYEKHKVYACEVTHQGLSSPVTKSF |
| | | NRGEC |
| SS-15758 | 87 | MDMRVPAQLLGLLLLWLRGARCDIVMTQSPLSL |
| (P1B6) | | PVTPGEPASISCRSSQSLLHSNGYNYLDVYLQKP |
| | | GQSPQLLIYLGSNRASGVPDRFSGSGSGTDFTLKI |
| | | SRVEAEDVGVYYCMQALQTPLTFGGGTKVEIKR |
| | | TVAAPSVFIFPPSDEQLKSGTASVVCLLNNFYPRE |
| | | AKVQWKVDNALQSGNSQESVTEQDSKDSTYSLS |
| | | STLTLSKADYEKHKVYACEVTHQGLSSPVTKSF |
| | | NRGEC |
| SS-15759 | 88 | MDMRYPAQLLGLLLLWLRGARCDIVMTQSPLSL |
| (P2F4) | | PVTPGEPASISCRSSQSLLHSNMYNYLDWYLQKP |
| | | GQSPQLLIYLGSNRASGVPDRFSGSGSGTDFTLKI |
| | | SRVEAEDVGVYYCMQALQTPLTFGGGTKVEIKR |
| | | TVAAPSVFIFPPSDEQLKSGTASVVCLLNNFYPRE |
| | | AKVQWKVDNALQSGNSQESVTEQDSKDSTYSLS |
| | | STLTLSKADYEKHKVYACEVTHQGLSSPVTKSF |
| | | NRGECQ |
| SS-15761 | 89 | MDMRVPAQLLGLLLLWLRGARCDIVMTQSPLSL |
| (P2G5) | | PVTPGEPASISCRSSQSLLHSNQYNYLDWYLQKP |
| | | GQSPQLLIYLGSNRASGVPDRESGSGSGTDFTLKI |
| | | SRVEAEDVGVYCMQALQTPLTFGGGTKVEIRR |
| | | TVAAPSVFIFPPSDEQLKSGTASVVCLLNNFYPRE |
| | | AKVQWKVDNALQSGNSQESVTEQDSKDSTYSLS |
| | | STLTLSKADYEKHKVYACEVTHQGLSSPVTKSF |
| | | NRGEC |
| SS-15763 | 90 | MDMRVPAQLLGLLLLWLRGARCDIVMTQSPLSL |
| (P2H7) | | PVTPGEPASISCRSSQSLMHSNGYNYLDWYLQKP |
| | | GQSPQLLIYLGSNRASGVPDRFSGSGSGTDFTLKI |
| | | SRVEAEDVGVYYCMQALQTPLTFGGGTKVEIKR |
| | | TVAAPSVFIFPPSDEQLKSGTASVVCLLNNFYPRE |
| | | AKVQWKVDNALQSGNSQESVTEQDSKDSTYSLS |
| | | STLTLSKADYEKHKVYACEVTHQGLSSPVTKSF |
| | | NRGEC |
| SS-15764 | 91 | MDMRVPAQLLGLLLLWLRGARCDIVMTQSPLSL |
| (P2H8) | | PVTPGEPASISCRSSQSLLHSNGYNYLDWYLQKP |
| | | GQSPQLLIYLGINRASGVPDRFSGSGSGTDFTLKI |
| | | SRVEAEDVGVYYCMQALQTPLTFGGGTKVEIKR |
| | | TVAAPSVFIFPPSDEQLKSGTASVVCLLNNFYPRE |
| | | AKVQWKVDNALQSGNSQESVTEQDSKDSTYSLS |
| | | STLTLSKADYEKHKVYACEVTHQGLSSPVTKSF |
| | | NRGEC |

TABLE 1B
Exemplary Antibody Heavy Chain Sequences

| | SEQ | |
|---|---|---|
| | ID | |
| Ab ID | NO: | Amino Acid Sequence |
| SS-13406 | 92 | MDMRVPAQLLGLLLLWLRGARCEVQLVESGGGLV |
| (8A3HLE- | | QPGGSLRLSCAASGFTFSSYWMSWVRQAPGKGLE |
| 51) | | WVASIKQDGSEKYYVDSVKGRFTISRDNARNSLYL |
| | | QMNSLRAEDTAVYYCARDLVLMVYDIDYYYYGM |
| | | DVWGQGTTVTVSSASTKGPSVFPLAPCSRSTSESTA |
| | | ALGCLVKDYFPEPVTVSWNSGALTSGVHTFPAVLQ |
| | | SSGLYSLSSVVTVPSSNFGTQTYTCNVDHKPSNTKV |
| | | DKTVERKCCVECPPCPAPPVAGPSVFLFPPKPKDTL |
| | | MISRTPEVFCVVVDVSHEDPEVQFNWYVDGVEVH |
| | | NAKTKPREEQFNSTFRVVSVLTVVHQDWLNGKEY |
| | | KCKVSNKGLPAPIEKTISKTKGQPREPQVYTLPPSRE |
| | | EMTKNQVSLTCLVKGFYPSDIAVEWESNGGCHLPF |
| | | AVCGGGQPENNYKTTPPMLDSDGSFFLYSKLTVDK |
| | | SRWQQGNVFSCSVMHEALHNHYTQKSLSLSPGK |
| SS-13407 | 93 | MDMRVPAQLLGLLLLWLRGARCEVQLVESGGGLV |
| (8A3HLE- | | QPGGSLRLSCAASGFTFSSYWMSWVRQAPGKGLE |
| 112) | | WVASIKQDGSEKYYVDSVKGRFTISRDNARNSLYL |
| | | QMNSLRAEDTAVYYCARDLVLMVYDIDYYYYGM |
| | | DVWGQGTTVTVSSASTKGPSVFPLAPCSRSTSESTA |
| | | ALGCLVKDYFPEPVTVSWNSGALTSGVHTFPAVLQ |
| | | SSGLYSLSSVVTVPSSNFGTQTYTCNVDHKPSNTKV |
| | | DKTVERKCCVECPPCPAPPVAGPSVFLFPPKPKDTL |
| | | MISRTPEVTCVVVDVSHEDPEVQFNWYVDGVEVH |
| | | NAKTKPREEQFNSTFRVVSVLTVVHQDWLNGKEY |
| | | KCKVSNKGLPAPIEKTISKTKGQPREPQVYTLPPSRE |
| | | EMTKNQVSLTCLVKGFYPSDIAVEWESNGGCALYP |
| | | TNCGGGQPENNYKTIPPMLDSDGSFFLYSKLTVDK |
| | | SRWQQGNVFSCSVMHEALHNHYTQKSLSESPGK |
| SS-14888 | 94 | MDMRVPAQLLGLLLLWLRGARCEVQLVESGGGLV |
| (P2C6- | | QPGGSLRLSCAASGFTFSSYWMSWVRQAPGKGLE |
| HLE51) | | WVASIKQDGSEKYYVDSVKGRFTISRDNARNSLYL |
| | | QMNSLRAEDTAVYYCARDLVLMVYDMDYYYYG |
| | | MDVWGQGTTVTVSSASTKGPSVFPLAPCSRSTSEST |
| | | AALGCLVKDYFPEPVTVSWNSGALTSGVHTFPAVL |
| | | QSSGLYSLSSVVTVPSSNFGTQTYTCNVDHKPSNTK |
| | | VDKTVERKCCVECPPCPAPPVAGPSVFLFPPKPKDT |
| | | LMISRTPEVTCVVVDVSHEDPEVQFNWYVDGVEV |
| | | HNAKTKPREEQFNSTFRVVSVLTVVHQDWLNGKE |
| | | YKCKVSNKGLPAPIEKTISKTKGQPRETQVYTLPPS |
| | | REEMTKNQVSLTCLVKGFYPSDIAVEWESNGGCHL |
| | | PFAVCGGGQPENNYKTTPPMLDSDGSFFLYSKLTV |
| | | DKSRWQQGNVFSCSVMHEALHNHYTQKSLSLSPGK |
| 13G9 | 95 | QVQLVQSGAEVTKPGASVKVSCKASGYTFTSYGIS |
| | | WVRQAPGQGLEWMGWISVYKGNTNYAQKLQGRV |
| | | TMTTDTSTSTAYMELRSLRSDDTAVYYCARNYQIF |
| | | SFDYWGQGTLVTVSSASTKGPSVFPLAPCSRSTSES |
| | | TAALGCLVKDYFPEPVTVSWNSGALTSGVHTFPAV |
| | | LQSSGLYSLSSVVTVPSSNFGTQTYTCNVDHKPSNT |
| | | KVDKTVERKCCVECPPCPAPPVAGPSVFLFPPKPKD |
| | | TLMISRTPEVTCVVVDVSHEDPEVQFNWYVDGVEV |
| | | HNAKTKPREEQFNSTFRVVSVLTVVHQDWLNGKE |
| | | YKCKVSNKGLPAPIEKTISKTKGQPREPQVYTLPPS |
| | | REEMTKNQVSLTCLVKGFYPSDIAVEWESNGQPEN |
| | | NYKTTPPMLDSDGSFFLYSKLTVDKSRWQQGNVFS |
| | | CSVMHEALHNHYTQKSLSLSPGK |
| 19A12 | 96 | QVQLVESGGGVVQPGRSLRLSCAASGFTFSSYGMH |
| | | WVRQAPGKGLEWVAVIWYDGSNKYYADSVKGRF |
| | | TISRDNSKNTLYLQMNSLRAEDTAVYYCVRDRGLD |
| | | WGQGTLVTVSSASTKGPSVFPLAPCSRSTSESTAAL |
| | | GCLVKDYFPEPVTVSWNSGALTSGVHTFPAVLQSS |
| | | GLYSLSSVVTVPSSNFGTQTYTCNVDHKPSNTKVD |
| | | KTVERKCCVECPPCPAPPVAGPSVFLFPPKPKDTLM |
| | | ISRTPEVTCVVVDVSHEDPEVQFNWYVDGVEVHN |
| | | AKTKPREEQFNSTFRVVSVLTVVHQDWLNGKEYK |
| | | CKVSNKGLPAPIEKTISKTKGQPREPQVYTLPPSREE |
| | | MTKNQVSLTCLVKGFYPSDIAVEWESNGQPENNYK |
| | | TTPPMLDSDGSFFLYSKLTVDKSRWQQGNVFSCSV |
| | | MHEALHNHYTQKSLSLSPGK |
| 20D12 | 97 | QVQLQQWGAGLLKPSETLSLTCAVSGGSFRAYYW |
| | | NWIRQPPGKGLEWIGEINHSGRTDYNPSLKSRVTIS |
| | | VDTSKNQFSLKLSSVTAADTAVYYCARGQLVPFDY |
| | | WGQGTLVTVSSASTKGPSVFPLAPCSRSTSESTAAL |
| | | GCLVKDYFPEPVTVSWNSGALTSGVHTFPAVLQSS |
| | | GLYSLSSVVTVPSSNFGTQTYTCNVDHKPSNTKVD |
| | | KTVERKCCVECPPCPAPPVAGPSVFLFPPKPKDTLM |
| | | ISRTPEVTCVVVDVSHEDPEVQFNWYVDGVEVHN |
| | | AKTKPREEQFNSTFRVVSVLTVVHQDWLNGKEYK |
| | | CKVSNKGLPAPIEKTISKTKGQPREPQVYTLPPSREE |
| | | MTKNQVSLTCLVKGFYPSDIAVEWESNGQPENNYK |
| | | TTPPMLDSDGSFFLYSKLTVDKSRWQQGNVFSCSV |
| | | MHEALHNHYTQKSLSLSPGK |
| 25B5 | 98 | QIQLVQSGAEVKKPGASVKVSCKASGYTLTSYGIS |
| | | WVRQAPGQGLEWMGWISFYNGNTNYAQKVQGRV |
| | | TMTTDTSTSTVYMELRSLRSDDTAVYFCARGYGM |
| | | DVWGQGTTVTVSSASTKGPSVFPLAPCSRSTSESTA |
| | | ALGCLVKDYFPEPVTVSWNSGALTSGVHTFPAVLQ |
| | | SSGLYSLSSVVTVPSSNFGTQTYTCNVDHKPSNTKV |
| | | DKTVERKCCVECPPCPAPPVAGPSVFLFPPKPKDTL |
| | | MISRTPEVTCVVVDVSHEDPEVQFNWYVDGVEVH |
| | | NAKTKPREEQFNSTFRVVSVLTVVHQDWLNGKEY |
| | | KCKVSNKGLPAPIEKTISKTKGQPREPQVYTLPPSRE |
| | | EMTKNQVSLTCLVKGFYPSDIAVEWESNGQPENNY |
| | | KTTPPMLDSDGSFFLYSKLTVDKSRWQQGNVFSCS |
| | | VMHEALHNHYTQKSLSLSPGK |
| 30G7 | 99 | QVQLVQSGAEVKKSGASVKVSCKASGYTLTSYGIS |
| | | WVRQAPGQGLEWMGWISVYNGNTNYAQKVQGR |
| | | VTMTTDTSTSTVYMEVRSLRSDDTAVYYCARGYG |
| | | MDVWGQGTTVTVSSASTKGPSVFPLAPCSRSTSEST |
| | | AALGCLVKDYFPEPVTVSWNSGALTSGVHTFPAVL |
| | | QSSGLYSLSSVVTVPSSNFGTQTYTCNVDHKPSNTK |
| | | VDKTVERKCCVECPPCPAPPVAGPSVFLFPPKPKDT |
| | | LMISRTPEVTCVVVDVSHEDPEVQFNWYVDGVEV |
| | | HNAKTKPREEQFNSTFRVVSVLTVVHQDWLNGKE |
| | | YKCKVSNKGLPAPIEKTISKTKGQPREPQVYTLPPS |
| | | REEMTKNQVSLTCLVKGFYPSDIAVEWESNGQPEN |
| | | NYKTTPPMLDSDGSFFLYSKLTVDKSRWQQGNVFS |
| | | CSVMHEALHNHYTQKSLSLSPGK |
| SS-15057 | 100 | MELGLRWVFLVAILEGVQCEVQLVESGGGLVKPG |
| | | GSLRLSCAASGFTHSSYSMNWVRQAPGKGLEWVS |
| | | SISSSSSYISYADSVKGRFTISRDNAKNSLYLQMNSL |
| | | RAEDTAVYFCARDYDFHSAYYDAFDVWGQGTMV |
| | | TVSSASTKGPSVFPLAPCSRSTSESTAALGCLVKDY |
| | | FPEPVTVSWNSGALTSGVHTFPAVLQSSGLYSLSSV |
| | | VTVPSSNFGTQTYTCNVDHKPSNTKVDKTVERKCC |
| | | VECPPCPAPPVAGPSVFLFPPKEKDTLMISRTPEVTC |
| | | VVVDVSHEDPEVQFNWYVDGVEVHNAKTKPREEQ |
| | | FNSTFRVVSVLTVVHQDWLNGKEYKCKVSNKGLP |
| | | APIEKTISKTKGQPREPQVYTLPPSREEMTKNQVSLT |
| | | CLVKGFYPSDIAVEWESNGQPENNYKTTPPMLDSD |
| | | GSFFLYSKLTVDKSRWQQGNVFSCSVMHEALHNH |
| | | YTQKSLSLSPGK |
| 15058 | 101 | MELGLRWVFLVAILEGVQCEVQLVESGGGLVKPG |
| | | GSLRLSCAASGFTFSSHSMNWVRQAPGKGLEWVSS |
| | | ISSSSSYISYADSVKGRFTISRDNAKNSLYLQMNSLR |
| | | AEDTAVYFCARDYDFHSAYYDAFDVWGQGTMVT |
| | | VSSASTKGPSVFPLAPCSRSTSESTAALGCLVKDYFP |
| | | EPVTVSWNSGALTSGVHTFPAVLQSSGLYSLSSVVT |
| | | VPSSNFGTQTYTCNVDHKPSNTKVDKTVERKCCVE |
| | | CPPCPAPPVAGPSVFLFPPKPKDTLMISRTPEVTCVV |
| | | VDVSPIEDPEVQFNWYVDGVEVHNAKTKPREEQFN |
| | | STFRVVSVLTVVHQDWLNGKEYKCKVSNKGLPAPI |
| | | EKTISKTKGQPREPQVYTLPPSREEMTKNQVSLTCL |
| | | VKGFYPSDIAVEWESNGQPENNYKTTPPMLDSDGS |
| | | FFLYSKLTVDKSRWQQGNVFSCSVMHEALHNHYT |
| | | QKSLSLSPGK |
| 15059 | 102 | MELGLRWVFLVAILEGVQCEVQLVESGGGLVKPG |
| | | GSLRLSCAASGFTFSSYSMNWVRQAPGKGLEWVSS |
| | | ISSHSSYISYADSVKGRFTISRDNAKNSLYLQMNSLR |
| | | AEDTAVYFCARDYDFHSAYYDAFDVWGQGTMVT |
| | | VSSASTKGPSVFPLAPCSRSTSESTAALGCLVKDYFP |
| | | EPVTVSWNSGALTSGVHTFPAVLQSSGLYSLSSWT |
| | | VPSSNFGTQTYTCNVDHKPSNTKVDKTVERKCCVE |
| | | CPPCPAPPVAGPSVFLFPPKPKDTLMISRTPEVTCVV |
| | | VDVSHEDPEVQFNWYVDGVEVHNAKTKPREEQFN |
| | | STFRVVSVLTVVHQDWLNGKEYKCKVSNKGLPAPI |
| | | EKTISKTKGQPREPQVYTLPPSREEMTKNQVSLTCL |
| | | VKGFYPSDIAVEWESNGQPENNYKTTPPMLDSDGS |
| | | FFLYSKLTVDKSRWQQGNVFSCSVMHEALHNHYT |
| | | QKSLSLSPGK |
| 15065 | 103 | MELGLRWVFLVAILEGVQCEVQLVESGGGLVKPG |
| | | GSLRLSCAASGFTFSSYSMNWVRQAPGKGLEWVSS |
| | | ISSSSSYISYADSVKGRFTISRDNAKNSLYLQMNSLR |
| | | AEDTAVYFCARDYDFHSAHYDAFDVWGQGTMVT |
| | | VSSASTKGPSVFPLAPCSRSTSESTAALGCLVKDYFP |
| | | EPVTVSWNSGALTSGVHTFPAVLQSSGLYSLSSVVT |
| | | VPSSNFGTQTYTCNVDHKPSNTKVDKTVERKCCVE |
| | | CPPCPAPPVAGPSVFLFPPKPKDTLMISRTPEVTCVV |
| | | VDVSHEDPEVQFNWYVDGVEVHNAKTKPREEQFN |
| | | STFRVVSVLTVVHQDWLNGKEYKCKVSNKGLPAPI |
| | | EKTISKTKGQPREPQVYTLPPSREEMTKNQVSLTCL |
| | | VKGFYPSDIAVEWESNGQPENNYKTTPPMLDSDGS |
| | | FFLYSKLTVDKSRWQQGNVFSCSVMHEALHNHYT |
| | | QKSLSLSPGK |
| 15079 | 104 | MELGLRWVFLVAILEGVOCEVQLVESGGGLVKPG |
| | | GSLRLSCAASGFTHSSYSMNWVRQAPGKGLEWVS |
| | | SISSSSSYISYADSVKGRFTISRDNAKNSLYLQMNSL |
| | | RAEDTAVYFCARDYDFHSAYYDAFDVWGQGTMV |
| | | TVSSASTKGPSVFPLAPCSRSTSESTAALGCLVKDY |
| | | FPEPVTVSWNSGALTSGVHTFPAVLQSSGLYSLSSV |
| | | VTVPSSNFGTQTYTCNVDHKPSNTKVDKTVERKCC |
| | | VECPPCPAPPVAGPSVFLFPPKPKDTLMISRTPEVTC |
| | | VVVDVSHEDPEVQFNWYVDGVEVHNAKTKPREEQ |
| | | FNSTFRVVSVLTVVHQDWLNGKEYKCKVSNKGLP |
| | | APIEKTISKTKGQPREPQVYTLPPSREEMTKNQVSLT |
| | | CLVKGFYPSDIAVEWESNGQPENNYKTTPPMLDSD |
| | | GSFFLYSKLTVDKSRWQQGNVFSCSVMHEALHNH |
| | | YTQKSLSLSPGK |
| 15080 | 105 | MELGLRWVFLVAILEGVQCEVQLVESGGGLVKPG |
| | | GSLRLSCAASGFTFSSHSMNWVRQAPGKGLEWVSS |
| | | ISSSSSYISYADSVKGRFTISRDNAKNSLYLQMNSLR |
| | | AEDTAVYFCARDYDFHSAYYDAFDVWGQGTMVT |
| | | VSSASTKGPSVFPLAPCSRSTSESTAALGCLVKDYFP |
| | | EPVTVSWNSGALTSGVHTFPAVLQSSGLYSLSSVVT |
| | | VPSSNFGTQTYTCNVDHKPSNTKVDKTVERKCCVE |
| | | CPPCPAPPVAGPSVFLFPPKPKDTLMISRTPEVTCVV |
| | | VDVSHEDPEVQFNWYVDGVEVHNAKTKPREEQFN |
| | | STFRVVSVLTVVHQDWLNGKEYKCKVSNKGLPAPI |
| | | EKTISKTKGQPREPQVYTLPPSREEMTKNQVSLTCL |
| | | VKGFYPSDIAVEWESNGQPENNYKTTPPMLDSDGS |
| | | FFLYSKLTVDKSRWQQGNVFSCSVMHEALHNHYT |
| | | QKSLSLSPGK |
| 15087 | 106 | MELGLRWVFLVAILEGVQCEVQLVESGGGLVKPG |
| | | GSLRLSCAASGFTFSSYSMNWVRQAPGKGLEWVSS |
| | | ISSSSSYISYADSVKGRFTISRDNAKNSLYLQMNSLR |
| | | AEDTAVYFCARDYDFHSAHYDAFDVWGQGTMVT |
| | | VSSASTKGPSVFPLAPCSRSTSESTAALGCLVKDYFP |
| | | EPVTVSWNSGALTSGVHTFPAVLQSSGLYSLSSVVT |
| | | VPSSNFGTQTYTCNVDHKPSNTKVDKTVERKCCVE |
| | | CPPCPAPPVAGPSVFLFPPKPKDTLMISRTPEVTCVV |
| | | VDVSHEDPEVQFNWYVDGVEVHNAKTKPREEQFN |
| | | STFRVVSVLTVVHQDWLNGKEYKCKVSNKGLPAPI |
| | | EKTISKTKGQPREPQVYTLPPSREEMTKNQVSLTCL |
| | | VKGFYPSDIAVEWESNGQPENNYKTTPPMLDSDGS |
| | | FFLYSKLTVDKSRWQQGNVFSCSVMHEALHNHYT |
| | | QKSLSLSPGK |
| 15101 | 107 | MELGLRWVFLVAILEGVQCEVQLVESGGGLVKPG |
| | | GSLRLSCAASGFTHSSYSMNWVRQAPGKGLEWVS |
| | | SISSSSHYISYADSVKGRFTISRDNAKNSLYLQMNSL |
| | | RAEDTAVYFCARDYDFHSAYYDAFDVWGQGTMV |
| | | TVSSASTKGPSVFPLAPCSRSTSESTAALGCLVKDY |
| | | FPEPVTVSWNSGALTSGVHTFPAVLQSSGLYSLSSV |
| | | VTVPSSNFGTQTYTCNVDHKPSNTKVDKTVERKCC |
| | | VECPPCPAPPVAGPSVFLFPPKPKDTLMISRTPEVTC |
| | | VVVDVSHEDPEVQFNWYVDGVEVHNAKTKPREEQ |
| | | FNSTFRVVSVLTVVHQPWLNGKEYKCKVSNKGLP |
| | | APIEKTISKTKGQPREPQVYTLPPSREEMTKNQVSLT |
| | | CLVKGFYPSDIAVEWESNGQPENNYKTTPPMLDSD |
| | | GSFFLYSKLTVDKSRWQQGNVFSCSVMHEALHNH |
| | | YTQKSLSLSPGK |
| 15103 | 108 | MELGLRWVFLVAILEGVQCEVQLVESGGGLVKPG |
| | | GSLRLSCAASGFTHSSYSMNWVRQAPGKGLEWVS |
| | | SISSSSSYISHADSVKGRFTISRDNAKNSLYQMNSL |
| | | RAEDTAVYFCARDYDFHSAYYDAEDVWGQGTMV |
| | | TVSSASTKGPSVFPLAPCSRSTSESTAALGCLVKDY |
| | | FPEPVTVSWNSGALTSGVHTFPAVLQSSGLYSLSSV |
| | | VTVPSSNFGTQTYTCNVDHKPSNTKVDKTVERKCC |
| | | VECPPCPAPPVAGPSVELFPPKPKDTLMISRTPEVTC |
| | | VVVDVSHEDPEVQFNWYVDGEVHNAKTKPREEQ |
| | | FNSTFRVVSVLTVVHQDWLNGKEYKCKVSNKGLP |
| | | APIEKTISKTKGQPREPQVYTLPPSREEMTKNQVSLT |
| | | CLVKGFYPSDIAVEWESNGQPENNYKTTPPMLDSD |
| | | GSFFLYSKLTVDKSRWQQGNVFSCSVMHEALHNH |
| | | YTQKSLSLSPGK |
| 15104 | 109 | MELGLRWVFLVAILEGVQCEVQLVESGGGLVKPG |
| | | GSLRLSCAASGFTHSSYSMNWVRQAPGKGLEWVS |
| | | SISSSSSYISYAHSVKGRFTISRDNAKNSLYLQMNSL |
| | | RAEDTAVYFCARDYDFHSAYYDAFDVWGQGTMV |
| | | TVSSASTKGPSVFPLAPCSRSTSESTAALGCLVKDY |
| | | FPEPVTVSWNSGALTSGVHTFPAVLQSSGLYSLSSV |
| | | VTVPSSNFGTQTYTCNVDHKPSNTKVDKTVERKCC |
| | | VECPPCPAPPVAGPSVFLFPPKPKDTLMISRTPEVTC |
| | | VVVDVSHEDPEVQFNWYVDGVEVHNAKTKPREEQ |
| | | FNSTFRVVSVLTVVHQDWLNGKEYKCKVSNKGLP |
| | | APIEKTISKTKGQPREPQVYTLPPSREEMTKNQVSLT |
| | | CLVKGFYPSDIAVEWESNGQPENNYKTTPPMLDSD |
| | | GSFFLYSKLTVDKSRWQQGNVFSCSVMHEALHNH |
| | | YTQKSLSLSPGK |
| 15105 | 110 | MELGLRWVFLVAILEGVQCEVQLVESGGGLVKPG |
| | | GSLRLSCAASGFTHSSYSMNWVRQAPGKGLEWVS |
| | | SISSSSHYISYADSVKGRFTISRDNAKNSLYLQMNSL |
| | | RAEDTAVYFCARDYDFHSAYYDAFDVWGQGTMV |
| | | TVSSASTKGPSVFPLAPCSRSTSESTAALGCLVKDY |
| | | FPEPVTVSWNSGALTSGVHTFPAVLQSSGLYSLSSV |
| | | VTVPSSNFGTQTYTCNVDHKPSNTKVDKTVERKCC |
| | | VECPPCPAPPVAGPSVFLFPPKPKDTLMISRTPEVTC |
| | | VVVDVSHEDPEVQFNWYVDGVEVHNAKTKPREEQ |
| | | FNSTFRVVSVLTVVHQPWLNGKEYKCKVSNKGLP |
| | | APIEKTISKTKGQPREPQVYTLPPSREEMTKNQVSLT |
| | | CLVKGFYPSDIAVEWESNGQPENNYKTTPPMLDSD |
| | | GSFFLYSKLTVDKSRWQQGNVFSCSVMHEALHNH |
| | | YTQKSLSLSPGK |
| 15106 | 111 | MELGLRWVFLVAILEGVQCEVQLVESGGGLVKPG |
| | | GSLRLSCAASGFTHSSYSMNWVRQAPGKGLEWVS |
| | | SISSSSSYISHADSVKGRFTISRDNAKNSLYQMNSL |
| | | RAEDTAVYFCARDYDFHSAYYDAEDVWGQGTMV |
| | | TVSSASTKGPSVFPLAPCSRSTSESTAALGCLVKDY |
| | | FPEPVTVSWNSGALTSGVHTFPAVLQSSGLYSLSSV |
| | | VTVPSSNFGTQTYTCNVDHKPSNTKVDKTVERKCC |
| | | VECPPCPAPPVAGPSVFLFPPKPKDTLMISRTPEVTC |
| | | VVVDVSHEDPEVQFNWYVDGEVHNAKTKPREEQ |
| | | FNSTFRVVSVLTVVHQDWLNGKEYKCKVSNKGLP |
| | | APIEKTISKTKGQPREPQVYTLPPSREEMTKNQVSLT |
| | | CLVKGFYPSDIAVEWESNGQPENNYKTTPPMLDSD |
| | | GSFFLYSKLTVDKSRWQQGNVFSCSVMHEALHNH |
| | | YTQKSLSLSPGK |
| 15108 | 112 | MELGLRWVFLVAILEGVQCEVQLVESGGGLVKPG |
| | | GSLRLSCAASGFTFSSHSMNWVRQAPGKGLEWVSS |
| | | ISSHSSYISYADSVKGRFTISRDNAKNSLYLQMNSLR |
| | | AEDTAVYFCARDYDFHSAYYDAFDVWGQGTMVT |
| | | VSSASTKGPSVFPLAPCSRSTSESTAALGCLVKDYFP |
| | | EPVTVSWNSGALTSGVHTFPAVLQSSGLYSLSSVVT |
| | | VPSSNFGTQTYTCNVDHKPSNTKVDKTVERKCCVE |
| | | CPPCPAPPVAGPSVFLFPPKPKDTLMISRTPEVTCVV |
| | | VDVSHEDPEVQFNWYVDGVEVHNAKTKPREEQFN |
| | | STFRVVSVLTVVHQDWLNGKEYKCKVSNKGLPAPI |
| | | EKTISKTKGQPREPQVYTLPPSREEMTKNQVSLTCL |
| | | VKGFYPSDIAVEWESNGQPENNYKTTPPMLDSDGS |
| | | FFLYSKLTVDKSRWQQGNVFSCSVMHEALHNHYT |
| | | QKSLSLSPGK |
| 15112 | 113 | MELGLRWVFLVAILEGVQCEVQLVESGGGLVKPG |
| | | GSLRLSCAASGFTFSSHSMNWVRQAPGKGLEWVSS |
| | | ISSSSSYISYAHSVKGRFTISRDNAKNSLYLQMNSLR |
| | | AEDTAVYFCARDYDFHSAYYDAFDVWGQGTMVT |
| | | VSSASTKGPSVFPLAPCSRSTSESTAALGCLVKDYFP |
| | | EPVTVSWNSGALTSGVHTFPAVLQSSGLYSLSSVVT |
| | | VPSSNFGTQTYTCNVDHKPSNTKVDKTVERKCCVE |
| | | CPPCPAPPVAGPSVFLFPPKPKDTLMISRTPEVTCVV |
| | | VDVSHEDPEVQFNWYVDGVEVHNAKTKPREEQFN |
| | | STFRVVSVLTVVHQPWLNGKEYKCKVSNKGLPAPI |
| | | EKTISKTKGQPREPQVYTLPPSREEMTKNQVSLTCL |
| | | VKGFYPSDIAVEWESNGQPENNYKTTPPMLDSDGS |
| | | FFLYSKLTVDKSRWQQGNVFSCSVMHEALHNHYT |
| | | QKSLSLSPGK |
| 15113 | 114 | MELGLRWVFLVAILEGVQCEVQLVESGGGLVKPG |
| | | GSLRLSCAASGFTFSSHSMNWVRQAPGKGLEWVSS |
| | | ISSSSSYISYADSVKGRFTISRDNAKNSLYQMNSLR |
| | | AEDTAVYFCARDYDFHSAYYDAFDVWGQGTMVT |
| | | VSSASTKGPSVFPLAPCSRSTSESTAALGCLVKDYFP |
| | | EPVTVSWNSGALTSGVHTFPAVLQSSGLYSLSSVVT |
| | | VPSSNFGTQTYTCNVDHKPSNTKVDKTVERKCCVE |
| | | CPPCPAPPVAGPSVFLFPPKPKDTLMISRTPEVTCVV |
| | | VDVSHEDPEVQFNWYVDGEVHNAKTKPREEQFN |
| | | STFRVVSVLTVVHQDWLNGKEYKCKVSNKGLPAPI |
| | | EKTISKTKGQPREPQVYTLPPSREEMTKNQVSLTCL |
| | | VKGFYPSDIAVEWESNGQPENNYKTTPPMLDSDGS |
| | | FFLYSKLTVDKSRWQQGNVFSCSVMHEALHNHYT |
| | | QKSLSLSPGK |
| 15114 | 115 | MELGLRWVFLVAILEGVQCEVQLVESGGGLVKPG |
| | | GSLRLSCAASGFTFSSHSMNWVRQAPGKGLEWVSS |
| | | ISSSSSYISYADSVKGRFTISRDNAKNSLYLQMNSLR |
| | | AEDTAVYFCARDYDFHSAHYDAFDVWGQGTMVT |
| | | VSSASTKGPSVFPLAPCSRSTSESTAALGCLVKDYFP |
| | | EPVTVSWNSGALTSGVHTFPAVLQSSGLYSLSSVVT |
| | | VPSSNFGTQTYTCNVDHKPSNTKVDKTVERKCCVE |
| | | CPPCPAPPVAGPSVFLFPPKPKDTLMISRTPEVTCVV |
| | | VDVSHEDPEVQFNWYVDGVEVHNAKTKPREEQFN |
| | | STFRVVSVLTVVHQDWLNGKEYKCKVSNKGLPAPI |
| | | EKTISKTKGQPREPQVYTLPPSREEMTKNQVSLTCL |
| | | VKGFYPSDIAVEWESNGQPENNYKTTPPMLDSDGS |
| | | FFLYSKLTVDKSRWQQGNVFSCSVMHEALHNHYT |
| | | QKSLSLSPGK |
| 15117 | 116 | MELGLRWVFLVAILEGVQCEVQLVESGGGLVKPG |
| | | GSLRLSCAASGFTFSSYSMNWVRQAPGKGLEWVSS |
| | | ISSHSSYHSYADSVKGRFTISRDNAKNSLYLQMNSL |
| | | RAEDTAWFCARDYDFHSAYYDAFDVWGQGTMV |
| | | TVSSASTKGPSVFPLAPCSRSTSESTAALGCLVKDY |
| | | FPEPVTVSWNSGALTSGVHTFPAVLQSSGLYSLSSV |
| | | VTVPSSNFGTQTYTCNVDHKPSNTKVDKTVERKCC |
| | | VECPPCPAPPVAGPSVFLFPPKPKDTLMISRTPEVTC |
| | | VVVDVSHEDPEVQFNWYVDGVEVHNAKTKPREEQ |
| | | FNSTFRVVSVLTVVHQDWLNGKEYKCKVSNKGLP |
| | | APIEKTISKTKGQPREPQVYTLPPSREEMTKNQVSLT |
| | | CLVKGFYPSDIAVEWESNGQPENNYKTTPPMLDSD |
| | | GSFFLYSKLTVDKSRWQQGNVFSCSVMHEALHNH |
| | | YTQKSLSLSPGK |
| 15121 | 117 | MELGLRWVFLVAILEGVQCEVQLVESGGGLVKPG |
| | | GSLRLSCAASGFTFSSYSMNWVRQAPGKGLEWVSS |
| | | ISSHSSYISYADSVKGRFTISRDNAKNSLYLQMNSLR |
| | | AEDTAVYFCARDYDFHSAHYDAFDVWGQGTMVT |
| | | VSSASTKGPSVFPLAPCSRSTSESTAALGCLVKDYFP |
| | | EPVTVSWNSGALTSGVHTFPAVLQSSGLYSLSSVVT |
| | | VPSSNFGTQTYTCNVDHKPSNTKVDKTVERKCCVE |
| | | CPPCPAPPVAGPSVFLFPPKPKDTLMISRTPEVTCVV |
| | | VDVSHEDPEVQFNWYVDGVEVHNAKTKPREEQFN |
| | | STFRVVSVLTVVHQDWLNGKEYKCKVSNKGLPAPI |
| | | EKTISKTKGQPREPQVYTLPPSREEMTKNQVSLTCL |
| | | VKGFYPSDIAVEWESNGQPENNYKTTPPMLDSDGS |
| | | FFLYSKLTVDKSRWQQGNVFSCSVMHEALHNHYT |
| | | QKSLSLSPGK |
| 15123 | 118 | MELGLRWVFLVAILEGVQCEVQLVESGGGLVKPG |
| | | GSLRLSCAASGFTFSSYSMNWVRQAPGKGLEWVSS |
| | | ISSSSHYHSYADSVKGRFTISRDNAKNSLYLQMNSL |
| | | RAEDTAVYFCARDYDFHSAYYDAFDVWGQGTMV |
| | | TVSSASTKGPSVFPLAPCSRSTSESTAALGCLVKDY |
| | | FPEPVTVSWNSGALTSGVHTFPAVLQSSGLYSLSSV |
| | | VTVPSSNFGTQTYTCNVDHKPSNTKVDKTVERKCC |
| | | VECPPCPAPPVAGPSVFLFPPKPKDTLMISRTPEVTC |
| | | VVVDVSHEDPEVQFNWYVDGVEVHNAKTKPREEQ |
| | | FNSTFRVVSVLTVVHQDWLNGKEYKCKVSNKGLP |
| | | APIEKTISKTKGQPREPQVYTLPPSREEMTKNQVSLT |
| | | CLVKGFYPSDIAVEWESNGQPENNYKTTPPMLDSD |
| | | GSFFLYSKLTVDKSRWQQGNVFSCSVMHEALHNH |
| | | YTQKSLSLSPGK |
| 15124 | 119 | MELGLRWVFLVAILEGVQCEVQLVESGGGLVKPG |
| | | GSLRLSCAASGFTFSSYSMNWVRQAPGKGLEWVSS |
| | | ISSSSHYISHADSVKGRFTISRDNAKNSLYLQMNSLR |
| | | AEDTAVYFCARDYDFHSAYYDAFDVWGQGTMVT |
| | | VSSASTKGPSVFPLAPCSRSTSESTAALGCLVKDYFP |
| | | EPVTVSWNSGALTSGVHTFPAVLQSSGLYSLSSVVT |
| | | VPSSNFGTQTYTCNVDHKPSNTKVDKTVERKCCVE |
| | | CPPCPAPPVAGPSVFLFPPKPKDTLMISRTPEVTCVV |
| | | VDVSHEDPEVQFNWYVDGVEVHNAKTKPREEQFN |
| | | STFRVVSVLTVVHQDWLNGKEYKCKVSNKGLPAPI |
| | | EKTISKTKGQPREPQVYTLPPSREEMTKNQVSLTCL |
| | | VKGFYPSDIAVEWESNGQPENNYKTTPPMLDSDGS |
| | | FFLYSKLTVDKSRWQQGNVFSCSVMHEALHNHYT |
| | | QKSLSLSPGK |
| 15126 | 120 | MELGLRWVFLVAILEGVQCEVQLVESGGGLVKPG |
| | | GSLRLSCAASGFTFSSYSMNWVRQAPGKGLEWVSS |
| | | ISSSSHYISYADHVKGRFTISRDNAKNSLYLQMNSL |
| | | RAEDTAVYFCARDYDFHSAYYDAFDVWGQGTMV |
| | | TVSSASTKGPSVFPLAPCSRSTSESTAALGCLVKDY |
| | | FPEPVTVSWNSGALTSGVHTFPAVLQSSGLYSLSSV |
| | | VTVPSSNFGTQTYTCNVDHKRSNTKVDKTVERKCC |
| | | VECPPCPAPPVAGPSVFLFPPKPKDTLMISRTPEVTC |
| | | VVVDVSHEDPEVQFNWYVDGVEVHNAKTKPREEQ |
| | | FNSTFRVVSVLTVVHQDWLNGKEYKCKVSNKGLP |
| | | APIEKTISKTKGQPREPQVYTLPPSREEMTKNQVSLT |
| | | CLVKGFYPSDIAVEWESNGQPENNYKTTPPMLDSD |
| | | GSFFLYSKLTVDKSRWQQGNVFSCSVMHEALHNH |
| | | YTQKSLSLSPGK |
| 15132 | 121 | MELGLRWVFLVAILEGVQCEVQLVESGGGLVKPG |
| | | GSLRLSCAASGFTFSSYSMNWVRQAPGKGLEWVSS |
| | | ISSSSSYHSYADSVKGRFTISRDNAKNSLYLQMNSL |
| | | RAEDTAVYFCARDYDFHSAHYDAFDVWGQGTMV |
| | | TVSSASTKGPSVFPLAPCSRSTSESTAALGCLVKDY |
| | | FPEPVTVSWNSGALTSGVHTFPAVLQSSGLYSLSSV |
| | | VTVPSSNFGTQTYTCNVDHKPSNTKVDKTVERKCC |
| | | VECPPCPAPPVAGPSVFLFPPKPKDTLMISRTPEVTC |
| | | VVVDVSHEDPEVQFNWYVDGVEVHNAKTKPREEQ |
| | | FNSTFRVVSVLTVVHQDWLNGKEYKCKVSNKGLP |
| | | APIEKTISKTKGQPREPQVYTLPPSREEMTKNQVSLT |
| | | CLVKGFYPSDIAVEWESNGQPENNYKTTPPMLDSD |
| | | GSFFLYSKLTVDKSRWQQGNVFSCSVMHEALHNH |
| | | YTQKSLSLSPGK |
| 15133 | 122 | MELGLRWVFLVAILEGVQCEVQLVESGGGLVKPG |
| | | GSLRLSCAASGFTFSSYSMNWVRQAPGKGLEWVSS |
| | | ISSSSSYHSYADSVKGRFTISRDNAKNSLYLQMNSL |
| | | RAEDTAVYFCARDYDFHSAYHDAFDVWGQGTMV |
| | | TVSSASTKGPSVFPLAPCSRSTSESTAALGCLVKDY |
| | | FPEPVTVSWNSGALTSGVHTFPAVLQSSGLYSLSSV |
| | | VTVPSSNFGTQTYTCNVDHKPSNTKVDKTVERKCC |
| | | VECPPCPAPPVAGPSVFLFPPKPKDTLMISRTPEVTC |
| | | VVVDVSHEDPEVQFNWYVDGVEVHNAKTKPREEQ |
| | | FNSTFRVVSVLTVVHQDWLNGKEYKCKVSNKGLP |
| | | APIEKTISKTKGQPREPQVYTLPPSREEMTKNQVSLT |
| | | CLVKGFYPSDIAVEWESNGQPENNYKTTPPMLDSD |
| | | GSFFLYSKLTVDKSRWQQGNVFSCSVMHEALHNH |
| | | YTQKSLSLSPGK |
| 15136 | 123 | MELGLRWVFLVAILEGVQCEVQLVESGGGLVKPG |
| | | GSLRLSCAASGFTFSSYSMNWVRQAPGKGLEWVSS |
| | | ISSSSSYISHADSVKGRFTISRDNAKNSLYLQMNSLR |
| | | AEDTAVYFCARDYDFHSAHYDAFDVWGQGTMVT |
| | | VSSASTKGPSVFPLAPCSRSTSESTAALGCLVKDYFP |
| | | EPVTVSWNSGALTSGVHTFPAVLQSSGLYSLSSVVT |
| | | VPSSNFGTQTYTCNVDHKPSNTKVDKTVERKCCVE |
| | | CPPCPAPPVAGPSVFLFPPKPKDTLMISRTPEVTCVV |
| | | VDVSHEDPEVQFNWYVDGVEVHNAKTKPREEQFN |
| | | STFRVVSVLTVVHQDWLNGKEYKCKVSNKGLPAPI |
| | | EKTISKTKGQPREPQVYTLPPSREEMTKNQVSLTCL |
| | | VKGFYPSDIAVEWESNGQPENNYKTTPPMLDSDGS |
| | | FFLYSKLTVDKSRWQQGWFSCSVMHEALHNHYT |
| | | QKSLSLSPGK |
| 15139 | 124 | MELGLRWVFLVAILEGVQCEVQLVESGGGLVKPG |
| | | GSLRLSCAASGFTFSSYSMNWVRQAPGKGLEWVSS |
| | | ISSSSSYISYAHSVKGRFTISRDNAKNSLYLQMNSLR |
| | | AEDTAVYFCARDYDFHSAHYDAFDVWGQGTMVT |
| | | VSSASTKGPSVFPLAPCSRSTSESTAALGCLVKDYFP |
| | | EPVTVSWNSGALTSGVHTFPAVLQSSGLYSLSSVVT |
| | | VPSSNFGTQTYTCNVDHKPSNTKVDKTVERKGCVE |
| | | CPPCPAPPVAGPSVFLFPPKPKDTLMISRTPEVTCVV |
| | | VDVSHEDPEVQFNWYVDGVEVHNAKTKPREEQFN |
| | | STFRVVSVLTVVHQDWLNGKEYKCKVSNKGLPAPI |
| | | EKTISKTKGQPREPQVYTLPPSREEMTKNQVSLTCL |
| | | VKGFYPSDLWEWESNGQPENNYKTTPPMLDSDGS |
| | | FFLYSKLTVDKSRWQQGNVFSCSVMHEALHNHYT |
| | | QKSLSLSPGK |
| 15140 | 125 | MELGLRWVFLVAILEGVQCEVQLVESGGGLVKPG |
| | | GSLRLSCAASGFTFSSYSMNWVRQAPGKGLEWVSS |
| | | ISSSSSYISYAHSVKGRFTISRDNAKNSLYLQMNSLR |
| | | AEDTAVYFCARDYDFHSAYHDAFDVWGQGTMVT |
| | | VSSASTKGPSVFPLAPCSRSTSESTAALGCLVKDYFP |
| | | EPVTVSWNSGALTSGVHTFPAVLQSSGLYSLSSVVT |
| | | VPSSNFGTQTYTCNVDHKPSNTKVDKTVERKCCVE |
| | | CPPCPAPPVAGPSVFLFPPKPKDTLMISRTPEVTCVV |
| | | VDVSHEDPEYQFNWYVDGVEVHNAKTKPREEQFN |
| | | STFRVVSVLTVVHQDWLNGKEYKCKVSNKGLPAPI |
| | | EKTISKTKGQPREPQVYTLPPSREEMTKNQVSLTCL |
| | | VKGFYPSDIAVEWESNGQPENNYKTTPPMLDSDGS |
| | | FFLYSKLTVDKSRWQQGNVFSCSVMHEALHNHYT |
| | | QKSLSLSPGK |
| 15141 | 126 | MELGLRWVFLVAILEGVQCEVQLVESGGGLVKPG |
| | | GSLRLSCAASGFTFSSYSMNWVRQAPGKGLEWVSS |
| | | ISSSSSYISYADHVKGRFTISRDNAKNSLYLQMNSLR |
| | | AEDTAVYFCARDYDFHSAHYDAFDVWGQGTMVT |
| | | VSSASTKGPSVFPLAPCSRSTSESTAALGCLVKDYFP |
| | | EPVTVSWNSGALTSGVHTFPAVLQSSGLYSLSSVVT |
| | | VPSSNFGTQTYTCNVDHKPSNTKVDKTVERKCCVE |
| | | CPPCPAPPVAGPSVFLFPPKPKDTLMISRTPEVTCVV |
| | | VDVSHEDPEVQFNWYVDGVEVHNAKTKPREEQFN |
| | | STFRVVSVLTVVHQDWLNGKEYKCKVSNKGLPAPI |
| | | EKTISKTKGQPREPQVYTLPPSREEMTKNQVSLTCL |
| | | VKGFYPSDIAVEWESNGQPENNYKTTPPMLDSDGS |
| | | FFLYSKLTVDKSRWQQGNWSCSVMHEALHNHYT |
| | | QKSLSLSPGK |
| SS-13983 | 127 | MDMRVPAQLLGLLLLWLRGARCEVQLVESGGGLV |
| A01 | | QPGGSLRLSCAASGFTFSSYWMSWVRQAPGKGLE |
| | | WVASIKQDGSEKYYVDSVKGRFTISRDNARNSLYL |
| | | QMNSLRAEDTAVYYCARDLVLMVYDIDYYYYGM |
| | | DVWGQGTTVTVSSASTKGPSVFPLAPCSRSTSESTA |
| | | ALGCLVKDYFPEPVTVSWNSGALTSGVHTFPAVLQ |
| | | SSGLYSLSSVVTVPSSNFGTQTYTCNVDHKPSNTKV |
| | | DKTVERKCCVECPPCPAPPVAGPSVFLFPPKPKDTL |
| | | MISRTPEVTCVVVDVSHEDPEVQFNWYVDGVEVH |
| | | NAKTKPREEQFNSTFRVVSVLTVVHQDWLNGKEY |
| | | KCKVSNKGLPAPIEKTISKTKGQPREPQVYTLPPSRE |
| | | EMTKNQVSLTCLVKGFYPSDIAVEWESNGQPENNY |
| | | KTTPPMLDSDGSFFLYSKLTVDKSRWQQGNVFSCS |
| | | VMHEALHNHYTQKSLSLSPGK |
| SS-13991 | 128 | MDMKYPAQLLGLLLLWLRGARCEVQLVESGGGLV |
| A02 | | QPGGSLRLSCAASGFTFSSYWMSWVRQAPGKGLE |
| | | WVASIKQDGSEKYYVDSVKGRFTISRDNARNSLYL |
| | | QMNSLRAEDTAVYYCARDLVLMVYDIDYYYYGM |
| | | DVWGQGTTVTVSSASTKGPSVFPLAPCSRSTSESTA |
| | | ALGCLVKDYFPEPVTVSWNSGALTSGVHTFPAVLQ |
| | | SSGLYSLSSVVTVPSSNFGTQTYTCNVDHKPSNTKV |
| | | DKTVERKCCVECPPCPAPPVAGPSVFLFPPKPKDTL |
| | | MISRTPEVTCVVVDVSHEDPEVQFNWYDGVEVH |
| | | NAKTKPREEQFNSTFRVVSVLTVVHQDWLNGKEY |
| | | KCKVSNKGLPAPIEKTISKTKGQPREPQVYTLPPSRE |
| | | EMTKNQVSLTCLVKGFYPSDIAVEWESNGQPENNY |
| | | KTTPPMLDSDGSFFLYSKLTVDKSRWQQGNVFSCS |
| | | VMHEALHNHYTQKSLSLSPGK |
| SS-13993 | 129 | MDMRVPAQLLGLLLLWLRGARCEVQLVESGGGLV |
| C02 | | QPGGSLRLSCAASGFTFSSYWMSWVRQAPGKGLE |
| | | WVASIKQDGSEKYYVDSVKGRFTISRDNARNSLYL |
| | | QMNSLRAEDTAVYYCARDLVLMVYDIDYYYYGM |
| | | DVWGQGTTVTVSSASTKGPSVFPLAPCSRSTSESTA |
| | | ALGCLVKDYFPEPVTVSWNSGALTSGVHTFPAVLQ |
| | | SSGLYSLSSVVTVPSSNFGTQTYTCNVDHKPSNTKV |
| | | DKTVERKCCVECPPCPAPPVAGPSVFLFPPKPKDTL |
| | | MISRTPEVTCVVVDVSHEDPEVQFNWYVDGVEVH |
| | | NAKTKPREEQFNSTFRVVSVLTVVHQDWLNGKEY |
| | | KCKVSNKGLPAPIEKTISKTKGQPREPQVYTLPPSRE |
| | | EMTKNQVSLTCLVTCGFYPSDIAVEWESNGQPENNY |
| | | KTTPPMLDSDGSFFLYSKLTVDKSRWQQGNVFSCS |
| | | VMHEALHNHYTQKSLSLSPGK |
| SS-12685 | 130 | MDMRVPAQLLGLLLLWLRGARCEVQLVESGGGLV |
| P1B1 | | QPGGSLRLSCAASGFTFSSYWMSWVRQAPGKGLE |
| | | WVASIKQDGSEKYYVDSVKGRFTISRDNARNSLYL |
| | | QMNSLRAEDTAVYYCARDLVLMVYDMDYYYYG |
| | | MDVWGQGTTVTVSSASTKGPSVFPLAPCSRSTSEST |
| | | AALGCLVKDYFPEPVTVSWNSGALTSGVHTFPAVL |
| | | QSSGLYSLSSVVTVPSSMFGTQTYTCNVDHKPSNTK |
| | | VDKTVERKCCVECPPCPAPPVAGPSVFLFPPKPKDT |
| | | LMISRTPEVTCVVVDVSHEDPEVQFNWYVDGVEV |
| | | HNAKTKPREEQFNSTFRVVSVLTVVHQDWLNGKE |
| | | YKCKVSNKGLPAPIEKTISKTKGQPREPQVYTLPPS |
| | | REEMTKNQVSLTCLVKGFYPSDIAVEWESNGQPEN |
| | | NYKTTPPMLDSDGSFFLYSKLTVDKSRWQQGNVFS |
| | | CSVMHEALHNHYTQKSLSLSPGK |
| SS-12686 | 131 | MDMRVPAQLLGLLLLWLRGARCEVQLVESGGGLV |
| P2F5 | | QPGGSLRLSCAASGFTFSSYWMSWVRQAPGKGLE |
| | | WVASIKQDGSEKYYVDSVKGRFTISRDNARNSLYL |
| | | QMNSLRAEDTAVYYCARDLVLMVYDMDYYYYG |
| | | MDVWGQGTTVTVSSASTKGPSVFPLAPCSRSTSEST |
| | | AALGCLVKDYFPEPVTVSWNSGALTSGVHTFPAVL |
| | | QSSGLYSLSSVVTVPSSNFGTQTYTCNVDHKPSNTK |
| | | VDKTVERKCCVECPPCPAPPVAGPSVFLFPPKPKDT |
| | | LMISRTPEVTCVVVDVSHEDPEVQFNWYVDGVEV |
| | | HNAKTKPREEQFNSTFRVVSVLTVVHQDWLNGKE |
| | | YKCKVSNKGLPAPIEKTISKTKGQPREPQVYTLPPS |
| | | REEMTKNQVSLTCLVKGFYPSDIAVEWESNGQPEN |
| | | NYKTTPPMLDSDGSFFLYSKLTVDKSRWQQGNVFS |
| | | CSVMHEALHNHYTQKSLSLSPGK |
| SS-12687 | 132 | MDMRVPAQLLGLLLLWLRGARCEVQLVESGGGLV |
| P2C6 | | QPGGSLRLSCAASGFTFSSYWMSWVRQAPGKGLE |
| | | WVASIKQDGSEKYYVDSVKGRFTISRDNARNSLYL |
| | | QMNSLRAEDTAVYYCARDLVLMVYDMDYYYYG |
| | | MDVWGQGTTVTVSSASTKGPSVFPLAPCSRSTSEST |
| | | AALGCLVKDYFPEPVTVSWNSGALTSGVHTFPAVL |
| | | QSSGLYSLSSVVTVPSSNFGTQTYTCNVDHKPSNTK |
| | | VDKTVERKCCVECPPCPAPPVAGPSVFLFPPKPKDT |
| | | LMISRTPEVTCVVVDVSHEDPEVQFNWYVDGVEV |
| | | HNAKTKPREEQFNSTFRVVSVLTVVHQDWLNGKE |
| | | YKCKVSNKGLPAPIEKTISKTKGQPREPQVYTLPPS |
| | | REEMTKNQVSLTCLVKGFYPSDIAVEWESNGQPEN |
| | | NYKTTPPMLDSDGSFFLYSKLTVDKSRWQQGNVFS |
| | | CSVMHEALHNHYTQKSLSLSPGK |
| SS-14892 | 133 | MDMRVPAQLLGLLLLWLRGARCEVQLVESGGGLV |
| P2F5/P2C6 | | QPGGSLRLSCAASGFTFSSYWMSWVRQAPGKGLE |
| | | WVASIKQDGSEKYYVDSVKGRFTISRDNARNSLYL |
| | | QMNSLRAEDTAVYYCARDLVLMVYDMDYYYYG |
| | | MDVWGQGTTVTVSSASTKGPSVFPLAPCSRSTSEST |
| | | AALGCLVKDYFPEPVTVSWNSGALTSGVHTFPAVL |
| | | QSSGLYSLSSVVTVPSSNFGTQTYTCNVDYHKPSNTK |
| | | VDKTVERKCCVECPPCPAPPVAGPSVFLFPPKPKDT |
| | | LMISRTPEVTCVVVDVSHEDPEVQFNWYVDGVEV |
| | | HNAKTKPREEQFNSTFRVVSVLTVVHQDWLNGKE |
| | | YKCKVSNKGLPAPIEKTISKTKGQPREPQVYTLPPS |
| | | REEMTKNQVSLTCLVKGFYPSDIAVEWESNGQPEN |
| | | NYKTTPPMLDSDGSFFLYSKLTVDKSRWQQGNVFS |
| | | CSVMHEALHNHYTQKSLSLSPGK |
| SS-15509 | 134 | MGSTAILGLLLAVLQGGRAEVQLVESGGGLVQPGG |
| | | SLRLSCAASGFTFSSYWMSWVRQAPGKGLEWVASI |
| | | KQDGSEKYYVDSVKGRFTISRDNARNSLYLQMNSL |
| | | RAEDTAVYYCARDLVLFVYDMDYYYYGMDVWG |
| | | QGTTVTVSSASTKGPSVFPLAPCSRSTSESTAALGCL |
| | | VKDYFPEPVTVSWNSGALTSGVHTFPAVLQSSGLY |
| | | SLSSVVTVPSSNFGTQTYTCNVDHKPSNTKVDKTV |
| | | ERKCCVECPPCPAPPVAGPSVFLFPPKPKDTLMISRT |
| | | PEVTCVVVDVSHEDPEVQFNWYVDGVEVHNAKTK |
| | | PREEQFNSTFRVVSVLTVVHQDWLNGKEYKCKVS |
| | | NKGLPAPIEKTISKTKGQPREPQVYTLPPSREEMTK |
| | | NQVSLTCLVKGFYPSDIAVEWESNGQPENNYKTTP |
| | | PMLDSDGSFFLYSKLTVDKSRWQQGNVFSCSVMH |
| | | EALHNHYTQKSLSLSPGK |
| SS-15510 | 135 | MGSTAILGLLLAVLQGGRAEVQLVESGGGLVQPGG |
| | | SLRLSCAASGFTFSSYWMSWVRQAPGKGLEWVASI |
| | | KQDGSEKYYVDSVKGRFTISRDNARNSLYLQMNSL |
| | | RAEDTAVYYCARDLVLFVYDMDYYYYGMDVWG |
| | | QGTTVTVSSASTKGPSVFPLAPCSRSTSESTAALGCL |
| | | VKDYFPEPVTVSWNSGALTSGVHTFPAVLQSSGLY |
| | | SLSSVVTVPSSNFGTQTYTCNVDHKPSNTKVDKTV |
| | | ERKCCVECPPCPAPPVAGPSVFLFPPKPKDTLMISRT |
| | | PEVTCVVVDVSHEDPEVQFNWYVDGVEVHNAKTK |
| | | PREEQFNSTFRVVSVLTVVHQDWLNGKEYKGKVS |
| | | NKGLPAPIEKTISKTKGQPREPQVYTLPPSREEMTK |
| | | NQVSLTCLVKGFYPSDIAVEWESNGQPENNYKTTP |
| | | PMLDSDGSFFLYSKLTVDKSRWQQGNVFSCSVMH |
| | | EALHNHYTQKSLSLSPGK |
| SS-15511 | 136 | MGSTAILGLLLAVLQGGRAEVQLVESGGGLVQPGG |
| | | SLRLSCAASGFTFSSYWMSWVRQAPGKGLEWVASI |
| | | KQDGSEKYYVDSVKGRFTISRDNARNSLYLQMNSL |
| | | RAEDTAVYYCARDLVLFVYDMDYYYYGMDVWG |
| | | QGTTVTVSSASTKGPSVFPLAPCSRSTSESTAALGCL |
| | | VKDYFPEPVTVSWNSGALTSGVHTFPAVLQSSGLY |
| | | SLSSVVTVPSSNFGTQTYTCNVDHKPSNTKVDKTV |
| | | ERKCCVECPPCPAPPVAGPSVFLFPPKPKDTLMISRT |
| | | PEVTCVVVDVSHEDPEVQFNWYVDGVEVHNAKTK |
| | | PREEQFNSTFRVVSVLTVVHQDWLNGKEYKCKVS |
| | | NKGLPAPIEKTISKTKGQPREPQVYTLPPSREEMTK |
| | | NQVSLTCLVKGFYPSDIAVEWESNGQPENNYKTTP |
| | | PMLDSDGSFFLYSKLTVDKSRWQQGNVFSCSVMH |
| | | EALHNHYTQKSLSLSPGK |
| SS-15512 | 137 | MGSTAILGLLLAVLQGGRAEVQLVESGGGLVQPGG |
| | | SLRLSCAASGFTFSSYWMSWVRQAPGKGLEWVASI |
| | | KQDGSEKYYVDSVKGRFTISRDNARNSLYLQMNSL |
| | | RAEDTAVYYCARDLVLFVYDMDYYYYGMDVWG |
| | | QGTTVTVSSASTKGPSVFPLAPCSRSTSESTAALGCL |
| | | VKDYFPEPVTVSWNSGALTSGVHTFPAVLQSSGLY |
| | | SLSSVVTVPSSNFGTQTYTCNVDHKPSNTKVDKTV |
| | | ERKCCVECPPCPAPPVAGPSVFLFPPKPKDTLMISRT |
| | | PEVTCVVVDVSHEDPEVQFNWYVDGVEVHNAKTK |
| | | PREEQFNSTFRVVSVLTVVHQDWLNGKEYKCKVS |
| | | NKGLPAPIEKTISKTKGQPREPQVYTLPPSREEMTK |
| | | NQVSLTCLVKGFYPSDIAVEWESNGQPENNYKTTP |
| | | PMLDSDGSFFLYSKLTVDKSRWQQGNVFSCSVMH |
| | | EALHNHYTQKSLSLSPGK |
| SS-15513 | 138 | MGSTAILGLLLAVLQGGRAEVQLVESGGGLVQPGG |
| | | SLRLSCAASGFTFSSYWMSWVRQAPGKGLEWVASI |
| | | KQDGSEKYYVDSVKGRFTISRDNARNSLYLQMNSL |
| | | RAEDTAVYYCARDLVLFVYDMDYYYYGMDVWG |
| | | QGTTVTVSSASTKGPSVFPLAPCSRSTSESTAALGCL |
| | | VKDYFPEPVTVSWNSGALTSGVHTFPAVLQSSGLY |
| | | SLSSVVTVPSSNFGTQTYTCNVDHKPSNTKVDKTV |
| | | ERKCCVECPPCPAPPVAGPSVFLFPPKPKDTLMISRT |
| | | PEVTCVVVDVSHEDPEVQFNWYVDGVEVPFNAKTK |
| | | PREEQFNSTFRVVSVLTVVHQDWLNGKEYKCKVS |
| | | NKGLPAPIEKTISKTKGQPREPQVYTLPPSREEMTK |
| | | NQVSLTCLVKGFYPSDIAVEWESNGQPENNYKTTP |
| | | PMLDSDGSFFLYSKLTVDKSRWQQGNVFSCSVMH |
| | | EALHNHYTQKSLSLSPGK |
| SS-15514 | 139 | MGSTAILGLLLAVLQGGRAEVQLVESGGGLVQPGG |
| | | SLRLSCAASGFTFSSYWMSWVRQAPGKGLEWVASI |
| | | KQDGSEKYYVDSVKGRFTISRDNARNSLYLQMNSL |
| | | RAEDTAVYYCARDLVLFVYDMDYYYYGMDVWG |
| | | QGTTVTVSSASTKGPSVFPLAPCSRSTSESTAALGCL |
| | | VKDYFPEPVTVSWNSGALTSGVHTFPAVLQSSGLY |
| | | SLSSVVTVPSSNFGTQTYTCNVDHKPSNTKVDKTV |
| | | ERKCCVECPPCPAPPVAGPSVFLFPPKPKDTLMISRT |
| | | PEVTCVVVDVSHEDPEVQFNWYVDGVEVHNAKTK |
| | | PREEQFNSTFRVVSVLTVVHQDWLNGKEYKCKVS |
| | | NKGLPAPIEKTISKTKGQPREPQVYTLPPSREEMTK |
| | | NQVSLTCLVKGFYPSDIAVEWESNGQPENNYKTTP |
| | | PMLDSDGSFFLYSKLTVDKSRWQQGNVFSCSVMH |
| | | EALHNHYTQKSLSLSPGK |
| SS-15497 | 140 | MGSTAILGLLLAVLQGGRAEVQLVESGGGLVQPGG |
| | | SLRLSCAASGFTFSSYWMSWVRQAPGKGLEWVASI |
| | | KQDGSEKYYVDSVKGRFTISRDNARNSLYLQMNSL |
| | | RAEDTAVYYCARDLVLSVYDMDYYYYGMDVWG |
| | | QGTTVTVSSASTKGPSVFPLAPCSRSTSESTAALGCL |
| | | VKDYFPEPVTVSWNSGALTSGVHTFPAVLQSSGLY |
| | | SLSSVVTVPSSNFGTQTYTCNVDHKPSNTKVDKTV |
| | | ERKCCVECPPCPAPPVAGPSVFLFPPKPKDTLMISRT |
| | | PEVTCVVVDVSHEDPEVQFNWYVDGVEVHNAKTK |
| | | PREEQFNSTFRVVSVLTVVHQDWLNGKEYKCKVS |
| | | NKGLPAPIEKTISKTKGQPREPQVYTLPPSREEMTK |
| | | NQVSLTCLVKGFYPSDIAVEWESNGQPENNYKTTP |
| | | PMLDSDGSFFLYSKLTVDKSRWQQGNVFSCSVMH |
| | | EALHNHYTQKSLSLSPGK |
| SS-15515 | 141 | MGSTAILGLLLAVLQGGRAEVQLVESGGGLVQPGG |
| | | SLRLSCAASGFTFSSYWMSWVRQAPGKGLEWVASI |
| | | KQDGSEKYYVDSVKGRFTISRDNARNSLYLQMNSL |
| | | RAEDTAVYYCARDLVLSVYDMDYYYYGMDVWG |
| | | QGTTVTVSSASTKGPSVFPLAPCSRSTSESTAALGCL |
| | | VKDYFPEPVTVSWNSGALTSGVHTFPAVLQSSGLY |
| | | SLSSVVTVPSSNFGTQTYTCNVDHKPSNTKVDKTV |
| | | ERKCCVECPPCPAPPVAGPSVFLFPPKPKDTLMISRT |
| | | PEVTCVVVDVSHEDPEVQFNWYVDGVEVHNAKTK |
| | | PREEQFNSTFRVVSVLTVVHQDWLNGKEYKCKVS |
| | | NKGLPAPIEKTISKTKGQPREPQVYTLPPSREEMTK |
| | | NQVSLTCLVKGFYPSDIAVEWESNGQPENNYKTTP |
| | | PMLDSDGSFFLYSKLTVDKSRWQQGNVFSCSVMH |
| | | EALHNHYTQKSLSLSPGK |
| SS-15516 | 142 | MGSTAILGLLLAVLQGGRAEVQLVESGGGLVQPGG |
| | | SLRLSCAASGFTFSSYWMSWVRQAPGKGLEWVASI |
| | | KQDGSEKYYVDSVKGRFTISRDNARNSLYLQMNSL |
| | | RAEDTAVYYCARDLVLSVYDMDYYYYGMDVWG |
| | | QGTTVTVSSASTKGPSVFPLAPCSRSTSESTAALGCL |
| | | VKDYFPEPVTVSWNSGALTSGVHTFPAVLQSSGLY |
| | | SLSSVVTVPSSNFGTQTYTCNVDHKPSNTKVDKTV |
| | | ERKCCVECPPCPAPPVAGPSVFLFPPKPKDTLMISRT |
| | | PEVTCVVVDVSHEDPEVQFNWYVDGVEVHNAKTK |
| | | PREEQFNSTFRVVSVLTVVHQDWLNGKEYKCKVS |
| | | NKGLPAPIEKTISKTKGQPREPQVYTLPPSREEMTK |
| | | NQVSLTCLVKGFYPSDIAVEWESNGQPENNYKTTP |
| | | PMLDSDGSFFLYSKLTVDKSRWQQGNVFSCSVMH |
| | | EALHNHYTQKSLSLSPGK |
| SS-15517 | 143 | MGSTAILGLLLAVLQGGRAEVQLVESGGGLVQPGG |
| | | SLRLSCAASGFTFSSYWMSWVRQAPGKGLEWVASI |
| | | KQDGSEKYYVDSVKGRFTISRDNARNSLYLQMNSL |
| | | RAEDTAVYYCARDLVLSVYDMDYYYYGMDVWG |
| | | QGTTVTVSSASTKGPSVFPLAPCSRSTSESTAALGCL |
| | | VKDYFPEPVTVSWNSGALTSGVHTFPAVLQSSGLY |
| | | SLSSVVTVPSSNFGTQTYTCNVDHKPSNTKVDKTV |
| | | ERKCCVECPPCPAPPVAGPSVFLFPPKPKDTLMISRT |
| | | PEVTCVVVDVSHEDPEVQFNWYVDGVEVHNAKTK |
| | | PREEQFNSTFRVVSVLTVVHQDWLNGKEYKCKVS |
| | | NKGLPAPIEKTISKTKGQPREPQVYTLPPSREEMTK |
| | | NQVSLTCLVKGFYPSDIAVEWESNGQPENNYKTTP |
| | | PMLDSDGSFFLYSKLTVDKSRWQQGNVFSCSVMH |
| | | EALHNHYTQKSLSLSPGK |
| SS-15518 | 144 | MGSTAILGLLLAVLQGGRAEVQLVESGGGLVQPGG |
| | | SLRLSCAASGFTFSSYWMSWVRQAPGKGLEWVASI |
| | | KQDGSEKYYVDSVKGRFTISRDNARNSLYLQMNSL |
| | | RAEDTAVYYCARDLVLSVYDMDYYYYGMDVWG |
| | | QGTTVTVSSASTKGPSVFPLAPCSRSTSESTAALGCL |
| | | VKDYFPEPVTVSWNSGALTSGVHTFPAVLQSSGLY |
| | | SLSSVVTVPSSNFGTQTYTCNVDHKPSNTKVDKTV |
| | | ERKCCVECPPCPAPPVAGPSVFLFPPKPKDTLMISRT |
| | | PEVTCVVVDVSHEDPEVQFNWYVDGVEVHNAKTK |
| | | PREEQFNSTFRVVSVLTVVHQDWLNGKEYKCKVS |
| | | NKGLPAPIEKTISKTKGQPREPQVYTLPPSREEMTK |
| | | NQVSLTCLVKGFYPSDIAVEWESNGQPENNYKTTP |
| | | PMLDSDGSFFLYSKLTVDKSRWQQGNVFSCSVMH |
| | | EALHNHYTQKSLSLSPGK |
| SS-15519 | 145 | MGSTAILGLLLAVLQGGRAEVQLVESGGGLVQPGG |
| | | SLRLSCAASGFTFSSYWMSWVRQAPGKGLEWVASI |
| | | KQDGSEKYYVDSVKGRFTISRDNARNSLYLQMNSL |
| | | RAEDTAVYYCARDLVLSVYDMDYYYYGMDVWG |
| | | QGTTVTVSSASTKGPSVFPLAPCSRSTSESTAALGCL |
| | | VKDYFPEPVTVSWNSGALTSGVHTFPAVLQSSGLY |
| | | SLSSVVTVPSSNFGTQTYTCNVDHKPSNTKVDKTV |
| | | ERKCCVECPPCPAPPVAGPSVFLFPPKPKDTLMISRT |
| | | PEVTCVVVDVSHEDPEVQFNWYVDGVEVHNAKTK |
| | | PREEQFNSTFRVVSVLTVVHQDWLNGKEYKCKVS |
| | | NKGLPAPIEKTISKTKGQPREPQVYTLPPSREEMTK |
| | | NQVSLTCLVKGFYPSDIAVEWESNGQPENNYKTTP |
| | | PMLDSDGSFFLYSKLTVDKSRWQQGNVFSCSVMH |
| | | EALHNHYTQKSLSLSPGK |
| SS-15520 | 146 | MGSTAILGLLLAVLQGGRAEVQLVESGGGLVQPGG |
| | | SLRLSCAASGFTFSSYWMSWVRQAPGKGLEWVASI |
| | | KQDGSEKYYVDSVKGRFTISRDNARNSLYLQMNSL |
| | | RAEDTAVYYCARDLVLSVYDMDYYYYGMDVWG |
| | | QGTTVTVSSASTKGPSVFPLAPCSRSTSESTAALGCL |
| | | VKDYFPEPVTVSWNSGALTSGVHTFPAVLQSSGLY |
| | | SLSSVVTVPSSNFGTQTYTCNVDHKPSNTKVDKTV |
| | | ERKCCVECPPCPAPPVAGPSVFLFPPKPKDTLMISRT |
| | | PEVTCVVVDVSHEDPEVQFNWYVDGVEVHNAKTK |
| | | PREEQFNSTFRAVVSVLTVVHQDWLNGKEYKCKVS |
| | | NKGLPAPIEKTISKTKGQPREPQVYTLPPSREEMTK |
| | | NQVSLTCLVKGFYPSDIAVEWESNGQPENNYKTTP |
| | | PMLDSDGSFFLYSKLTVDKSRWQQGNVFSCSVMH |
| | | EALHNHYTQKSLSLSPGK |
| SS-15522 | 147 | MGSTAILGLLLAVLQGGRAEVQLVESGGGLVQPGG |
| | | SLRLSCAASGFTFSSYWMSWVRQAPGKGLEWVASI |
| | | KQDGSEKYYVDSVKGRFTISRDNARNSLYLQMNSL |
| | | RAEDTAVYYCARDLVLSVYDMDYYYYGMDVWG |
| | | QGTTVTVSSASTKGPSVFPLAPCSRSTSESTAALGCL |
| | | VKDYFPEPVTVSWNSGALTSGVHTFPAVLQSSGLY |
| | | SLSSVVTVPSSNFGTQTYTCNVDHKPSNTKVDKTV |
| | | ERKCCVECPPCPAPPVAGPSVFLFPPKPKDTLMISRT |
| | | PEVTCVVVDVSHEDPEVQFNWYVDGVEVHNAKTK |
| | | PREEQFNSTFRVVSVLTVVHQDWLNGKEYKCKVS |
| | | NKGLPAPIEKTISKTKGQPREPQVYTLPPSREEMTK |
| | | NQVSLTCLVKGFYPSDIAVEWESNGQPENNYKTTP |
| | | PMLDSDGSFFLYSKLTVDKSRWQQGNVFSCSVMH |
| | | EALHNHYTQKSLSLSPGK |
| SS-15524 | 148 | MGSTAILGLLLAVLQGGRAEVQLVESGGGLVQPGG |
| | | SLRLSCAASGFTFSSYWMSWVRQAPGKGLEWVASI |
| | | KQDGSEKYYVDSVKGRFTISRDNARNSLYLQMNSL |
| | | RAEDTAVYYCARDLVLFVYDMDYYYYGMDVWG |
| | | QGTTVTVSSASTKGPSVFPLAPCSRSTSESTAALGCL |
| | | VKDYFPEPVTVSWNSGALTSGVHTFPAVLQSSGLY |
| | | SLSSVVTVPSSNFGTQTYTCNVDHKPSNTKVDKTV |
| | | ERKCCVECPPCPAPPVAGPSVFLFPPKPKDTLMISRT |
| | | PEVTCVVVDVSHEDPEVQFNWYVDGVEVHNAKTK |
| | | PREEQFNSTFRVVSVLTVVHQDWLNGKEYKCKVS |
| | | NKGLPAPIEKTISKTKGQPREPQVYTLPPSREEMTK |
| | | NQVSLTCLVKGFYPSDIAVEWESNGQPENNYKTTP |
| | | PMLDSDGSFFLYSKLTVDKSRWQQGNVFSCSVMH |
| | | EALHNHYTQKSLSLSPGK |
| SS-14835 | 149 | MDMRVPAQLLGLLLLWLRGARCEVQLVESGGGLV |
| | | QPGGSLRLSCAASGFTFSSYWMSWVRQAPGKGLE |
| | | WVASIKQDGSEKYYVDSVKGRFTISRDNARNSLYL |
| | | QMNSLRAEDTAVYYCARDLVLMVYDIDYYYYGM |
| | | DVWGQGTTVTVSSASTKGPSVFPLAPCSRSTSESTA |
| | | ALGCLVKDYFPEPVTVSWNSGALTSGVHTFPAVLQ |
| | | SSGLYSLSSVVTVPSSNFGTQTYTCNVDHKPSNTKV |
| | | DKTVERKCCVECPPCPAPPVAGPSVFLFPPKPKDTL |
| | | MISRTPEVTCVVVDVSHEDPEVQFNWYVDGVEVH |
| | | NAKTKPREEQFNSTFRVVSVLTVVHQDWLNGKEY |
| | | KCKVSNKGLPAPIEKTISKTKGQPREPQVYTLPPSRE |
| | | EMTKNQVSLTCLVKGFYPSDIAVEWESNGQPENNY |
| | | KTTPPMLDSDGSFFLYSKLTVDKSRWQQGNVFSCS |
| | | VMHEALHNHYTQKSLSLSPGK |
| SS-15194 | 150 | TTMDMRVPAQLLGLLLLWLRGARCEVQLVESGGG |
| | | LVQPGGSLRLSCAASGFTFSSYWMSWVRQAPGKG |
| | | LEWVASIKQDGSEKYYVDSVKGRFTISRDNARNSL |
| | | YLQMNSLRAEDTAVYYCARDLVLMVYDMDYYYY |
| | | GMDVWGQGTTVTVSSASTKGPSVFPLAPCSRSTSE |
| | | STAALGCLVKDYFPEPVTVSWNSGALTSGVHTFPA |
| | | VLQSSGLYSLSSVVTVPSSNFGTQTYTCNVDHKPSN |
| | | TKVDKTVERKCCVECPPCPAPPVAGPSVFLFPPKPK |
| | | DTLMISRTPEVTCVVVDVSHEDPEVQFNWYVDGVE |
| | | VHNAKTKPREEQFNSTFRVVSVLTVVHQDWLNGK |
| | | EYKCKVSNKGLPAPIEKTISKTKGQPREPQVYTLPPS |
| | | REEMTKNQVSLTCLVKGFYPSDIAVEWESNGQPEN |
| | | NYKTTPPMLDSDGSFFLYSKLTVDKSRWQQGNVFS |
| | | CSVMHEALHNHYTQKSLSLSPGK |
| SS-15195 | 151 | MDMRVPAQLLGLLLLWLRGARCEVQLVESGGGLV |
| | | QPGGSLRLSCAASGFTFSSYWMSWVRQAPGKGLE |
| | | WVASIKQDGSEKYYVDSVKGRFTISRDNARNSLYL |
| | | QMNSLRAEDTAVYYCARDLVLMVYDMDYYYYG |
| | | MDVWGQGTTVTVSSASTKGPSVFPLAPCSRSTSEST |
| | | AALGCLVKDYFPEPVTVSWNSGALTSGVHTFPAVL |
| | | QSSGLYSLSSVVTVPSSNFGTQTYTCNVDHKPSNTK |
| | | VDKTVERKCCVECPPCPAPPVAGPSVFLFPPKPKDT |
| | | LMISRTPEVTCVVVDVSHEDPEVQFNWYVDGVEV |
| | | HNAKTKPREEQFNSTFRVVSVLTVVHQDWLNGKE |
| | | YKCKVSNKGLPAPIEKTISKTKGQPREPQVYTLPPS |
| | | REEMTKNQVSLTCLVKGFYPSDIAVEWESNGQPEN |
| | | NYKTTPPMLDSDGSFFLYSKLTVDKSRWQQGNVFS |
| | | CSVMHEALHNHYTQKSLSLSPGK |
| SS-15196 | 152 | MDMRVPAQLLGLLLLWLRGARCEVQLVESGGGLV |
| | | QPGGSLRLSCAASGFTFSSYWMSWVRQAPGKGLE |
| | | WVASIKQDGSEKYYVDSVKGRFTISRDNARNSLYL |
| | | QMNSLRAEDTAVYYCARDLVLMVYDMDYYYYG |
| | | MDVWGQGTTVTVSSASTKGPSVFPLAPCSRSTSEST |
| | | AALGCLVKDYFPEPVTVSWNSGALTSGVHTFPAVL |
| | | QSSGLYSLSSVVTVPSSNFGTQTYTCNVDHKPSNTK |
| | | VDKTVERKCCVECPPCPAPPVAGPSVFLFPPKPKDT |
| | | LMISRTPEVTCVVVDVSHEDPEVQFNWYVDGVEV |
| | | HNAKTKPREEQFNSTFRVVSVLTVVHQDWLNGKE |
| | | YKCKVSNKGLPAPIEKTISKTKGQPREPQVYTLPPS |
| | | REEMTKNQVSLTCLVKGFYPSDIAVEWESNGQPEN |
| | | NYKTTPPMLDSDGSFFLYSKLTVDKSRWQQGNVFS |
| | | CSVMHEALHNHYTQKSLSLSPGK |
| SS-14894 | 153 | TTMDMRVPAQLLGLLLLWLRGARCEVQLVESGGG |
| | | LVQPGGSLRLSCAASGFTFSSYWMSWVRQAPGKG |
| | | LEWVASIKQDGSEKYYVDSVKGRFTISRDNARNSL |
| | | YLQMNSLRAEDTAVYYCARDLVLMVYDMDYYYY |
| | | GMDVWGQGTTVTVSSASTKGPSVFPLAPCSRSTSE |
| | | STAALGCLVKDYFPEPVTVSWNSGALTSGVHTFPA |
| | | VLQSSGLYSLSSVVTVPSSNFGTQTYTCNVDHKPSN |
| | | TKVDKTVERKCCVECPPCPAPPVAGPSVFLFPPKPK |
| | | DTLMISRTPEVTCVVVDVSHEDPEVQFNWYVDGVE |
| | | VHNAKTKPREEQFNSTFRVVSVLTVVHQDWLNGK |
| | | EYKCKVSNKGLPAPIEKTISKTKGQPREPQVYTLPPS |
| | | REEMTKNQVSLTCLVKGFYPSDIAVEWESNGQPEN |
| | | NYKTTPPMLDSDGSFFLYSKLTVDKSRWQQGNVFS |
| | | CSVMHEALHNHYTQKSLSLSPGK |
| SS-15504 | 154 | MGSTAILGLLLAVLQGGRAEVQLVESGGGLVQPGG |
| | | SLRLSCAASGFTFSSYWMSWVRQAPGKGLEWVASI |
| | | KQDGSEKYYVDSVKGRFTISRDNARNSLYLQMNSL |
| | | RAEDTAVYYCARDLVLSVYDMDYYYYGMDVWG |
| | | QGTTVTVSSASTKGPSVFPLAPCSRSTSESTAALGCL |
| | | VKDYFPEPVTVSWNSGALTSGVHTFPAVLQSSGLY |
| | | SLSSVVTVPSSNFGTQTYTCNVDHKPSNTKVDKTV |
| | | ERKCCVECPPCPAPPVAGPSVFLFPPKPKDTLMISRT |
| | | PEVTCVVVDVSHEDPEVQFNWYVDGVEVHNAKTK |
| | | PREEQFNSTFRVVSVLTVVHQDWLNGKEYKCKVS |
| | | NKGLPAPIEKTISKTKGQPREPQVYTLPPSREEMTK |
| | | NQVSLTCLVKGFYPSDIAVEWESNGQPENNYKTTP |
| | | PMLDSDGSFFLYSKLTVDKSRWQQGNVFSCSVMH |
| | | EALHNHYTQKSLSLSPGK |
| SS-15494 | 155 | MGSTAILGLLLAVLQGGRAEVQLVESGGGLVQPGG |
| | | SLRLSCAASGFTFSSYWMSWVRQAPGKGLEWVASI |
| | | KQDGSEKYYVDSVKGRFTISRDNARNSLYLQMNSL |
| | | RAEDTAVYYCARDLVLFVYDMDYYYYGMDVWG |
| | | QGTTVTVSSASTKGPSVFPLAPCSRSTSESTAALGCL |
| | | VKDYFPEPVTVSWNSGALTSGVHTFPAVLQSSGLY |
| | | SLSSVVTVPSSNFGTQTYTCNVDHKPSNTKVDKTV |
| | | ERKCCVECPPCPAPPVAGPSVFLFPPKPKDTLMISRT |
| | | PEVTCVVVDVSHEDPEVQFNWYVDGVEVHNAKTK |
| | | PREEQFNSTFRAVVSVLTVVHQDWLNGKEYKCKVS |
| | | NKGLPAPIEKTISKTKGQPREPQVYTLPPSREEMTK |
| | | NQVSLTCLVKGFYPSDIAVEWESNGQPENNYKTTP |
| | | PMLDSDGSFFLYSKLTVDKSRWQQGNVFSCSVMH |
| | | EALHNHYTQKSLSLSPGK |
| SS-14892 | 156 | MDMRVPAQLLGLLLLWLRGARCEVQLVESGGGLN |
| | | QPGGSLRLSCAASGFTFSSYWMSWVRQAPGKGLE |
| | | WVASIKQDGSEKYYVDSVKGRFTISRDNARNSLYL |
| | | QMNSLRAEDTAVYYCARDLVLMVYDMDYYYYG |
| | | MDVWGQGTTVTVSSASTKGPSVFPLAPCSRSTSEST |
| | | AALGCLVKDYFPEPVTVSWNSGALTSGVHTFPAVL |
| | | QSSGLYSLSSVVTVPSSNFGTQTYTCNVDHKPSNTK |
| | | VDKTVERKCCVECPPCPAPPVAGPSVFLFPPKPKDT |
| | | LMISRTPEVTCVVVDVSHEDPEVQFNWYVDGVEV |
| | | HNAKTKPREEQFNSTFRVVSVLTVVHQDWLNGKE |
| | | YKCKVSNKGLPAPIEKTISKTKGQPREPQVYTLPPS |
| | | REEMTKNQVSLTCLVKGFYPSDIAVEWESNGQPEN |
| | | NYKTTPPMLDSDGSFFLYSKLTVDKSRWQQGNVFS |
| | | CSVMHEALHNHYTQKSLSLSPGK |
| SS-15495 | 157 | MGSTAILGLLLAVLQGGRAEVQLVESGGGLVQPGG |
| | | SLRLSCAASGFTFSSYWMSWVRQAPGKGLEWVASI |
| | | KQDGSEKYYVDSVKGRFTISRDNARNSLYLQMNSL |
| | | RAEDTAVYYCARDLVLFVYDMDYYYYGMDVWG |
| | | QGTTVTVSSASTKGPSVFPLAPCSRSTSESTAALGCL |
| | | VKDYFPEPVTVSWNSGALTSGVHTFPAVLQSSGLY |
| | | SLSSVVTVPSSNFGTQTYTCNVDHKPSNTKVDKTV |
| | | ERKCCVECPPCPAPPVAGPSVFLFPPKPKDTLMISRT |
| | | PEVTCVVVDVSHEDPEVQFNWYVDGVEVHNAKTK |
| | | PREEQFNSTFRVVSVLTVVHQDWLNGKEYKCKVS |
| | | NKGLPAPIEKTISKTKGQPREPQVYTLPPSREEMTK |
| | | NQVSLTCLVKGFYPSDIAVEWESNGQPENNYKTTP |
| | | PMLDSDGSFFLYSKLTVDKSRWQQGNVFSCSVMH |
| | | EALHNHYTQKSLSLSPGK |
| SS-15496 | 158 | MDMRVPAQLLGLLLLWLRGARCEVQLVESGGGLV |
| | | QPGGSLRLSCAASGFTFSSYWMSWVRQAPGKGLE |
| | | WVASIKQDGSEKYYVDSVKGRFTISRDNARNSLYL |
| | | QMNSLRAEDTAVYYCARDLYLMVYDMDYYYYG |
| | | MDVWGQGTTVTSSASTKGPSVFPLAPCSRSTSEST |
| | | AALGCLVKDYFPEPVTVSWNSGALTSGVHTFPAVL |
| | | QSSGLYSLSSVVTVPSSNFGTQTYTCNVDHKPSNTK |
| | | VDKTVERKCCVECPPCPAPPVAGPSVFLFPPKPKDT |
| | | LMISRTPEVTCVVVDVSHEDPEVQFNWYVDGVEV |
| | | HNAKTKPREEQFNSTFRVVSVLTVVHQDWLNGKE |
| | | YKCKVSNKGLPAPIEKTISKTKGQPREPQVYTLPPS |
| | | REEMTKNQVSLTCLVKGFYPSDIAVEWESNGQPEN |
| | | NYKTTPPMLDSDGSFFLYSKLTVDKSRWQQGNVFS |
| | | CSVMHEALHNHYTQKSLSLSPGK |
| SS-15497 | 159 | MGSTAILGLLLAVLQGGRAEVQLVESGGGLVQPGG |
| | | SLRLSCAASGFTFSSYWMSWVRQAPGKGLEWVASI |
| | | KQDGSEKYYVDSVKGRFTISRDNARNSLYLQMNSL |
| | | RAEDTAVYYCARDLVLSVYDMDYYYYGMDVWG |
| | | QGTTVTVSSASTKGPSVFPLAPCSRSTSESTAALGCL |
| | | VKDYFPEPVTVSWNSGALTSGVHTFPAVLQSSGLY |
| | | SLSSVVTVPSSNFGTQTYTCNVDHKPSNTKVDKTV |
| | | ERKCCVECPPCPAPPVAGPSVFLFPPKPKDTLMISRT |
| | | PEVTCVVVDVSHEDPEVQFNWYVDGVEVHNAKTK |
| | | PREEQFNSTFRVVSVLTVVHQDWLNGKEYKCKVS |
| | | NKGLPAPIEKTISKTKGQPREPQVYTLPPSREEMTK |
| | | NQVSLTCLVKGFYPSDIAVEWESNGQPENNYKTTP |
| | | PMLDSDGSFFLYSKLTVDKSRWQQGNVFSCSVMH |
| | | EALHNHYTQKSLSLSPGK |
| SS-15503 | 160 | MGSTAILGLLLAVLQGGRAEVQLVESGGGL |
| | | VQPGGSLRLSCAASGFTFSSYWMSWVRQAP |
| | | GKGLEWVASIKQDGSEKYYVDSVKGRFTISR |
| | | DNARNSLYLQMNSLRAEDTAVYYCARDLVL |
| | | SVYDMDYYYYGMDVWGQGTTVTVSSASTK |
| | | GPSVFPLAPCSRSTSESTAALGCLVKDYFPEP |
| | | VTVSWNSGALTSGVHTFPAVLQSSGLYSLSS |
| | | VVTVPSSNFGTQTYTCNVDHKPSNTKVDKT |
| | | VERKCCVECPPCPAPPVAGPSVFLFPPKPKD |
| | | TLMISRTPEVTCVVVDVSHEDPEVQFNWYV |
| | | DGVEVHNAKTKPREEQFNSTFRVVSVLYVV |
| | | HQDWLNGKEYKCKVSNKGLPAPIEKTISKT |
| | | KGQPREPQVYTLPPSREEMTKNQVSLTCLV |
| | | KGFYPSDIAVEWESNGQPENNYKTTPPMLDS |
| | | DGSFFLYSKLTVDKSRWQQGNVFSCSVMHE |
| | | ALHNHYTQKSLSLSPGK |
| SS-15505 | 161 | MGSTAILGLLLAVLQGGRAEVQLVESGGGL |
| | | VQPGGSLRLSCSAAGFTFSSYWMSWVRQAP |
| | | GKGLEWVASIKQDGSEKYYVDSVKGRFTISR |
| | | DNARNSLYLQMNSLRAEDTAVYYCARDLVL |
| | | FVYDMDYYYYGMDVWGQGTTVTVSSASTK |
| | | GPSVFPLAPCSRSTSESTAALGCLVKDYFPEP |
| | | VTVSWNSGALTSGVHTFPAVLQSSGLYSLSS |
| | | VVTVPSSNFGTQTYTCNVDHKPSNTKVDKT |
| | | VERKCCVECPPCPAPPVAGPSVFLFPPKPKD |
| | | TLMISRTPEVTCVVVDVSHEDPEVQFNWYV |
| | | DGVEVHNAKTKPREEQFNSTFRVVSVLTVV |
| | | HQDWLNGKEYKCKVSNKGLPAPIEKTISKT |
| | | KGQPREPQVYTLPPSREEMTKNQVSLTCLV |
| | | KGFYPSDIAVEWESNGQPENNYKTTPPMLDS |
| | | DGSFFLYSKLTVDKSRWQQGNVFSCSVMHE |
| | | ALHNHYTQKSLSLSPGK |
| SS-15506 | 162 | MGSTAILGLLLAVLQGGRAEVQLVESGGGLVQPGG |
| | | SLRLSCAASGFTFSSYWMSWVRQAPGKGLEWVASI |
| | | KQDGSEKYYVDSVKGRFTISRDNARNSLYLQMNSL |
| | | RAEDTAVYYCARDLVLNVYDMDYYYYGMDVWG |
| | | QGTTVTVSSASTKGPSVFPLAPCSRSTSESTAALGCL |
| | | VKDYFPEPVTVSWNSGALTSGVHTFPAVLQSSGLY |
| | | SLSSVVTVPSSNFGTQTYTCNVDHKPSNTKVDKTV |
| | | ERKCCVECPPCPAPPVAGPSVFLFPPKPKDTLMISRT |
| | | PEVTCVVVDVSHEDPEVQFNWYVDGVEVHNAKTK |
| | | PREEQFNSTFRVVSVLTVVHQDWLNGKEYKCKVS |
| | | NKGLPAPIEKTISKTKGQPREPQVYTLPPSREEMTK |
| | | NQVSLTCLVKGFYPSDIAVEWESNGQPENNYKTTP |
| | | PMLDSDGSFFLYSKLTVDKSRWQQGNVFSCSVMH |
| | | EALHNHYTQKSLSLSPGK |
| SS-15507 | 163 | MDMRVPAQLLGLLLLWLRGARCEVQLVESGGGLV |
| | | QPGGSLRLSCAASGFTFSSYWMSWVRQAPGKGLE |
| | | WVASIKQDGSEKYYVDSVKGRFTISRDNARNSLYL |
| | | QMNSLRAEDTAVYYCARDLVLMVYDIDYYYYGM |
| | | DVWGQGTTVTVSSASTKGPSVFPLAPCSRSTSESTA |
| | | ALGCLVKDYFPEPVTVSWNSGALTSGVHTFPAVLQ |
| | | SSGLYSLSSVVTVPSSNFGTQTYTCNVDHKPSNTKV |
| | | DKTVERKCCVECPPCPAPPVAGPSVFLFPPKPKDTL |
| | | MISRTPEVTCVVVDVSHEDPEVQFNWYVDGVEVH |
| | | NAKTKPREEQFNSTFRVVSVLTVVHQDWLNGKEY |
| | | KCKVSNKGLPAPIEKTISKPKGQPREPQVYTLPPSRE |
| | | EMTKNQVSLCLVKGFYPSDIAVEWESNGQPENNY |
| | | KTTPPMLDSDGSFFLYSKLTVDKSRWQQGNVFSCS |
| | | VMHEALHNHYTQKSLSLSPGK |
| SS-15502 | 164 | MGSTAILGLLLAVLQGGRAEVQLVESGGGLVQPGG |
| | | SLRLSCAASGFTFSSYWMSWVRQAPGKGLEWVASI |
| | | KQDGSEKYYVDSVKGRFTISRDNARNSLYLQMNSL |
| | | RAEDTAVYYCARDLVLNVYDMDYYYYGMDVWG |
| | | QGTTVTVSSASTKGPSVFPLAPCSRSTSESTAALGCL |
| | | VKDYFPEPVTVSWNSGALTSGVHTFPAVLQSSGLY |
| | | SLSSVVTVPSSNFGTQTYTCNVDHKPSNTKVDKTV |
| | | ERKCCVECPPCPAPPVAGPSVFLFPPKPKDTLMISRT |
| | | PEVTCVVVDVSHEDPEVQFNWYVDGVEVHNAKTK |
| | | PREEQFNSTFRVVSVLTVVHQDWLNGKEYKCKVS |
| | | NKGLPAPIEKTISKTKGQPREPQVYTLPPSREEMTK |
| | | NQVSLTCLVKGFYPSDIAVEWESNGQPENNYKTTP |
| | | PMLDSDGSFFLYSKLTVDKSRWQQGNVFSCSVMH |
| | | EALHNHYTQKSLSLSPGK |
| SS-15508 | 165 | MDMRVPAQLLGLLLLWLRGARCEVQLVESGGGLV |
| | | QPGGSLRLSCAASGFTFSSYWMSWVRQAPGKGLE |
| | | WVASIKQDGSEKYYVDSVKGRFTISRDNARNSLYL |
| | | QMNSLRAEDTAVYYCARDLVLMVYDIDYYYYGM |
| | | DVWGQGTTVTVSSASTKGPSVFPLAPCSRSTSESTA |
| | | ALGCLVKDYFPEPVTVSWNSGALTSGVHTFPAVLQ |
| | | SSGLYSLSSVVTVPSSNFGTQTYTCNVDHKPSNTKV |
| | | DKTVERKCCVECPPCPAPPVAGPSVFLFPPKPKDTL |
| | | MISRTPEVTCVVVDVSHEDPEVQFNWYVDGVEVH |
| | | NAKTKPREEQFNSTFRVVSVLTVVHQDWLNGKEY |
| | | KCKVSNKGLPAPIEKTISKTKGQPREPQVYTLPPSRE |
| | | EMTKNQVSLTCLVKGFYPSDIAVEWESNGQPENNY |
| | | KTTPPMLDSDGSFFLYSKLTVDKSRWQQGNVFSCS |
| | | VMHEALHNHYTQKSLSLSPGK |
| SS-15501 | 166 | MGSTAILGLLLAVLQGGRAEVQLVESGGGLVQPGG |
| | | SLRLSCAASGFTFSSYWMSWVRQAPGKGLEWVASI |
| | | KQDGSEKYYVDSVKGRFTISRDNARNSLYLQMNSL |
| | | RAEDTAVYYCARDLVLSVYDMDYYYYGMDVWG |
| | | QGTTVTVSSASTKGPSVFPLAPCSRSTSESTAALGCL |
| | | VKDYFPEPVTVSWNSGALTSGVHTFPAVLQSSGLY |
| | | SLSSVVTVPSSNFGTQTYTCNVDHKPSNTKVDKTV |
| | | ERKCCVECPPCPAPPVAGPSVFLFPPKPKDTLMISRT |
| | | PEVTCVVVDVSHEDPEVQFNWYVDGVEVHNAKTK |
| | | PREEQFNSTFRVVSVLTVVHQDWLNGKEYKCKVS |
| | | NKGLPAPIEKTISKTKGQPREPQVYTLPPSREEMTK |
| | | NQVSLTCLVKGFYPSDIAVEWESNGQPENNYKTTP |
| | | PMLDSDGSFFLYSKLTVDKSRWQQGNVFSCSVMH |
| | | EALHNHYTQKSLSLSPGK |
| SS-15500 | 167 | MGSTAILGLLLAVLQGGRAEVQLVESGGGLVQPGG |
| | | SLRLSCAASGFTFSSYWMSWVRQAPGKGLEWVASI |
| | | KQDGSEKYYVDSVKGRFTISRDNARNSLYLQMNSL |
| | | RAEDTAVYYCARDLVLNVYDMDYYYYGMDVWG |
| | | QGTTVTVSSASTKGPSVFPLAPCSRSTSESTAALGCL |
| | | VKDYFPEPVTVSWNSGALTSGVHTFPAVLQSSGLY |
| | | SLSSVVTVPSSNFGTQTYTCNVDHKPSNTKVDKTV |
| | | ERKCCVECPPCPAPPVAGPSVFLFPPKPKDTLMISRT |
| | | PEVTCVVVDVSHEDPEVQFNWYVDGVEVHNAKTK |
| | | PREEQFNSTFRVVSVLTVVHQDWLNGKEYKCKVS |
| | | NKGLPAPIEKTISKTKGQPREPQVYTLPPSREEMTK |
| | | NQVSLTCLVKGFYPSDIAVEWESNGQPENNYKTTP |
| | | PMLDSDGSFFLYSKLTVDKSRWQQGNVFSCSVMH |
| | | EALHNHYTQKSLSLSPGK |
| SS-15003 | 168 | MEFGLSWVFLVALLRGVQCEVHLVESGGGVVQPG |
| | | RSLRLSCAASGFTFNSFGMHWVRQAPGKGLEWVA |
| | | LIWSDGSDEYYADSVKGRFTISRDNSKNTLYLQMN |
| | | SLRAEDTAVYYCARAIAALYYYYGMDVWGQGTT |
| | | VTVSSASTKGPSVFPLAPCSRSTSESTAALGCLVKD |
| | | YFPEPVTVSWNSGALTSGVHTFPAVLQSSGLYSLSS |
| | | VVTVPSSNFGTQTYTCNVDHKPSNTKVDKTVERKC |
| | | CVECPPCPAPPVAGPSVFLFPPKPKDTLMISRTPEVT |
| | | CVVVDVSHEDPEVQFNWYVDGVEVHNAKTKPREE |
| | | QFNSTFRVVSVLTVVHQDWLNGKEYKCKVSNKGL |
| | | PAPIEKTISKTKGQPREPQVYTLPPSREEMTKNQVSL |
| | | TCLVKGFYPSDIAVEWESNGQPENNYKTTPPMLDS |
| | | DGSFFLYSKLTVDKSRWQQGNVFSCSVMHEALHN |
| | | HYTQKSLSLSPGK |
| SS-15005 | 169 | MGSTAILGLLLAVLQGGRAEVQLLESGGGLVQPGG |
| | | SLRLSCAASGFTFSSYAMNWVRQAPGKGLEWVSTI |
| | | SGSGGNTYYADSVKGRFTISRDNSKNTLYLQMNSL |
| | | RAEDTAVYYCAKKFVLMVYAMLDYWGQGTLVTV |
| | | SSASTKGPSVFPLAPCSRSTSESTAALGCLVKDYFPE |
| | | PVTVSWNSGALTSGVHTFPAVLQSSGLYSLSSVVT |
| | | VPSSNFGTQTYTCNVDHKPSNTKVDKTVERKCCVE |
| | | CPPCPAPPVAGPSVFLFPPKPKDTLMISRTPEVTCVV |
| | | VDVSHEDPEVQFNWYVDGVEVHNAKTKPREEQFN |
| | | STFRVVSVLTVVHQDWLNGKEYKCKVSNKGLPAPI |
| | | EKTISKTKGQPREPQVYTLPPSREEMTKNQVSLTCL |
| | | VKGFYPSDIAVEWESNGQPENNYKTTPPMLDSDGS |
| | | FFLYSKLTVDKSRWQQGNVFSCSVMHEALHNHYT |
| | | QKSLSLSPGK |
| SS-15757 | 170 | MDMRVPAQLLGLLLLWLRGARCEVQLVESGGGLV |
| (P1F4) | | QPGGSLRLSCAASGFTFSSYWMSWVRQAPGKGLE |
| | | WVASIKQDGSEKYYVDSVKGRFTISRDNARNSLYL |
| | | QMNSLRAEDTAVYYCARDLVLMVYDIDYYYYGM |
| | | DVWGQGTTVTVSSASTKGPSVFPLAPCSRSTSESTA |
| | | ALGCLVKDYFPEPVTVSWNSGALTSGVHTFPAVLQ |
| | | SSGLYSLSSVVTVPSSNFGTQTYTCNVDHKPSNTKV |
| | | DKTVERKCCVECPPCPAPPVAGPSVFLFPPKPKDTL |
| | | MISRTPEVTCVVVDVSHEDPEVQFNWYVDGVEVH |
| | | NAKTKPREEQFNSTFRVVSVLTVVHQDWLNGKEY |
| | | KCKVSNKGLPAPIEKTISKTKGQPREPQVYTLPPSRE |
| | | EMTKNQVSLTCLVKGFYPSDIAVEWESNGQPENNY |
| | | KTTPPMLDSDGSFFLYSKLTVDKSRWQQGNVFSCS |
| | | VMHEALHNHYTQKSLSLSPGK |
| SS-15758 | 171 | MDMRVPAQLLGLLLLWLRGARCEVQLVESGGGLV |
| (P1B6) | | QPGGSLRLSCAASGFTFSSYWMSWVRQAPGKGLE |
| | | WVASIKQDGSEKYYVDSVKGRFTISRDNARNSLYL |
| | | QMNSLRAEDTAVYYCARDLVLMVYDLDYYYYGM |
| | | DVWGQGTTVTVSSASTKGPSVFPLAPCSRSTSESTA |
| | | ALGCLVKDYFPEPVTVSWNSGALTSGVHTFPAVLQ |
| | | SSGLYSLSSVVTVPSSNFGTQTYTCNVDHKPSNTKV |
| | | DKTVERKCCVECPPCPAPPVAGPSVFLFPPKPKDTL |
| | | MISRTPEVTCVVVDVSHEDPEVQFNWYVDGVEVH |
| | | NAKTKPREEQFNSTFRVVSVLTVVHQDWLNGKEY |
| | | KCKVSNKGLPAPIEKTISKTKGQPREPQVYTLPPSRE |
| | | EMTKNQVSLTCLVKGFYPSDIAVEWESNGQPENNY |
| | | KTTPPMLDSDGSFFLYSKLTVDKSRWQQGNVFSCS |
| | | VMHEALHNHYTQKSLSLSPGK |
| SS-15759 | 172 | MDMRVPAQLLGLLLLWLRGARCEVQLVESGGGLV |
| (P2F4) | | QPGGSLRLSCAASGFTFSSYWMSWVRQAPGKGLE |
| | | WVASIKQDGSEKYYVDSVKGRFTISRDNARNSLYL |
| | | QMNSLRAEDTAVYYCARDLVLMVYDMDYYYYG |
| | | MDVWGQGTTVTVSSASTKGPSVFPLAPCSRSTSEST |
| | | AALGCLVKDYFPEPVTVSWNSGALTSGVHTFPAVL |
| | | QSSGLYSLSSVVTVPSSNFGTQTYTCNVDHKPSNTK |
| | | VDKTVERKCCVECPPCPAPPVAGPSVFLFPPKPKDT |
| | | LMISRTPEVTCVVVDVSHEDPEVQFNWYVDGVEV |
| | | HNAKTKPREEQFNSTFRVVSVLTVVHQDWLNGKE |
| | | YKCKVSNKGLPAPIEKTISKTKGQPREPQVYTLPPS |
| | | REEMTKNQVSLTCLVKGFYPSDIAVEWESNGQPEN |
| | | NYKTTPPMLDSDGSFFLYSKLTVDKSRWQQGNVFS |
| | | CSVMHEALHNHYTQKSLSLSPGK |
| SS-15761 | 173 | MDMRVPAQLLGLLLLWLRGARCEVQLVESGGGLV |
| (P2G5) | | QPGGSLRLSCAASGFTFSSYWMSWVRQAPGKGLE |
| | | WVASIKQDGSEKYYVDSVKGRFTISRDNARNSLYL |
| | | QMNSLRAEDTAVYYCARDLVLMVYDMDYYYYG |
| | | MDVWGQGTTVTVSSASTKGPSVFPLAPCSRSTSEST |
| | | AALGCLVKDYFPEPVTVSWNSGALTSGVHTFPAVL |
| | | QSSGLYSLSSVVTVPSSNFGTQTYTCNVDHKPSNTK |
| | | VDKTVERKCCVECPPCPAPPVAGPSVFLFPPKPKDT |
| | | LMISRTPEVTCVVVDVSHEDPEVQFNWYVDGVEV |
| | | HNAKTKPREEQFNSTFRVVSVLTVVHQDWLNGKE |
| | | YKCKVSNKGLPAPIEKTISKTKGQPREPQVYTLPPS |
| | | REEMTKNQVSLTCLVKGFYPSDIAVEWESNGQPEN |
| | | NYKTTPPMLDSDGSFFLYSKLTVDKSRWQQGNVFS |
| | | CSVMHEALHNHYTQKSLSLSPGK |
| SS-15763 | 174 | MDMRVPAQLLGLLLLWLRGARCEVQLVESGGGLV |
| (P2H7) | | QPGGSLRLSCAASGFTFSSYWMSWVRQAPGKGLE |
| | | WVASIKQDGSEKYYVDSVKGRFFISRDNARNSLYL |
| | | QMNSLRAEDTAVYYCARDLVLMVYDMDYYYYG |
| | | MDVWGQGTTVTVSSASTKGPSVFPLAPCSRSTSEST |
| | | AALGCLVKDYFPEPVTVSWNSGALTSGVHTFPAVL |
| | | QSSGLYSLSSVVTVPSSNFGTQTYTCNVDHKPSNTK |
| | | VDKTVERKCCVECPPCPAPPVAGPSVFLFPPKPKDT |
| | | LMISRTPEVTCVVVDVSHEDPEVQFNWYVDGVEV |
| | | HNAKTKPREEQFNSTFRVVSVLTVVHQDWLNGKE |
| | | YKCKVSNKGLPAPIEKTISKTKGQPREPQVYTLPPS |
| | | REEMTKNQVSLTCLVKGFYPSDIAVEWESNGQPEN |
| | | NYKTTPPMLDSDGSFFLYSKLTVDKSRWQQGNVFS |
| | | CSVMHEALHNHYTQKSLSLSPGK |
| SS-15764 | 175 | MDMRVPAQLLGLLLLWLRGARCEVQLVESGGGLV |
| (P2H8) | | QPGGSLRLSCAASGFTFSSYWMSWVRQAPGKGLE |
| | | WVASIKQDGSEKYYVDSVKGRFTISRDNARNSLYL |
| | | QMNSLRAEDTAVYYCARDLVLMVYDMDYYYYG |
| | | MDVWGQGTTVTVSSASTKGPSVFPLAPCSRSTSEST |
| | | AALGCLVKDYFPEPVTVSWNSGALTSGVHTFPAVL |
| | | QSSGLYSLSSVVTVPSSNFGTQTYTCNVDHKPSNTK |
| | | VDKTVERKCCVECPPCPAPPVAGPSVFLFPPKPKDT |
| | | LMISRTPEVTCVVVDVSHEDPEVQFNWYVDGVEV |
| | | HNAKTKPREEQFNSTFRVVSVLTVVHQDWLNGKE |
| | | YKCKVSNKGLPAPIEKTISKTKGQPREPQVYTLPPS |
| | | REEMTKNQVSLTCLVKGFYPSDIAVEWESNGQPEN |
| | | NYKTTPPMLDSDGSFFLYSKLTVDKSRWQQGNVFS |
| | | CSVMHEALHNHYTQKSLSLSPGK |

[0102] Each of the exemplary heavy chains (SEQ ID NO; 92, SEQ ID NO: 93 SEQ ID NO: 94, etc.) listed in Table 1B, infra, can be combined with any of the exemplary light chains shown in Table 1A, infra, to form an antibody.

[0103] In another aspect of the instant disclosure, “hemibodies” are provided. A hemibody is a monovalent antigen binding protein comprising (i) an intact light chain, and (ii) a heavy chain fused to an Fc region (e.g., an IgG2 Fc region of SEQ ID NO: 5), optionally via a linker, The linker can be a (G₄S)ₓ linker (SEQ ID NO: 1771) where “x” is a non-zero integer (e.g., (G₄S)₂, (G₄S)₃, (G₄S)₄, (G₄S)₅, (G₄S)₆, (G₄S)₇, (G₄S)₈, (G₄S)₉, (G₄S)₁₀; SEQ ID NOs: 1770-1778, respectively). Hemibodies can be constructed using the provided heavy and light chain components.

[0104] Other antigen binding proteins that are provided are variants of antibodies formed by combination of the heavy and light chains shown in Tables 1A and 1B, infra and comprise light and/or heavy chains that each have at least 70%, 75%, 80%, 85%, 90%, 95%, 96%, 97%, 98% or 99% identity to the amino acid sequences of these chains. In some instances, such antibodies include at least one heavy chain and one light chain, whereas in other instances the variant forms contain two identical light chains and two identical heavy chains.

### Variable Domains of Antigen Binding Proteins

[0105] Also provided are antigen binding proteins that contain an antibody heavy chain variable region selected from the group consisting of as shown in Table 2B and/or an antibody light chain variable region selected from the group consisting as shown in Table 2A, and immunologically functional fragments, derivatives, muteins and variants of these light chain and heavy chain variable regions.

TABLE 2A
Exemplary Antibody Variable Light (V_{L}) Chains

| | SEQ | |
|---|---|---|
| | ID | |
| Ab ID | NO: | Amino Acid Sequence |
| SS-13406 | 186 | DIVMTQSPLSLPVTPGEPASISCRSSQSLLHSNGYNY |
| (8A3HLE- | | LDWYLQKPGQSPQLLIYLGSNRASGVPDRFSGSGS |
| 51) | | GTDFTLKISRVEAEDVGVYYCMQALQTPLTFGGGT |
| | | KVEIKR |
| SS-13407 | 187 | DIVMTQSPLSLPVTPGEPASISCRSSQSLLHSNGYNY |
| (8A3HLE- | | LDWYLQKPGQSPQLLIYLGSNRASGVPDRFSGSGS |
| 112) | | GTDFTLKISRVEAEDVGVYYCMQALQTPLTFGGGT |
| | | KVEIKR |
| SS-14888 | 188 | DIVMTQSPLSLPVTPGEPASISCRSSQSLLHSNGYNY |
| (P2C6- | | LDWYLQKPGQSPQLLIYLGLNRASGVPDRFSGSGS |
| HLE51) | | GTDFTLKISRVEAEDVGVYYCMQALQTPLTFGGGT |
| | | KVEIKR |
| 13G9 | 189 | QSVLTQPPSVSGAPGQRVTISCTGSRSNIGAGYDVN |
| | | WYQQLPGTAPKLLIYGNSNRPSGVPDRFSGSKSGTS |
| | | ASLVITGLQAEDEADYYCQSYDSNLSGSVFGGGTK |
| | | LTVLG |
| 19A12 | 190 | DIVLTQSPDFLAVSLGERATINCKSSQNVLYSSSNK |
| | | NYLVWYQHKPGQPPKLLIYWASTRESGVPDRFSGS |
| | | GSGTDFTLTISSLQAEDVAVYYCHQYYSTPWTFGQ |
| | | GTKVEIKR |
| 20D12 | 191 | QSVLTQPPSASGTPGQRVTISCSGSNSNIGSNTVNW |
| | | YQQVPGTAPKLLIYSNNQRPSGVPDRFSGSKSGTSA |
| | | SLAISGLQSEDEADYYCAAWDDSLNGWVFGGGTK |
| | | LTVLG |
| 25B5 | 192 | QSALTQPASVSGSPGQSITISCTGTSSDVGGYNSVS |
| | | WYQQHPGKPPKLMTYEVSNRPSGISNRFSGSKSGNT |
| | | ASLTISGLQAEDEADYFCSSYTSTSMVFGGGTKLAV |
| | | LR |
| 30G7 | 193 | QSALTQPASVSGSPGQSITISCTGTSSDVGGYNSVS |
| | | WYQQHPGKPPKLMIYEVSNRPSGVSNRFSGSKSAN |
| | | TASLTISGLQADDEADYFCSSYTSTSMVFGGGTKLT |
| | | VLR |
| SS-15057 | 194 | ESVLTQPPSVSGAPGQRVTISCTGSSSNIGAGHDVH |
| | | WYQQLPGTAPKLLISGNSNRPSGVPDRFSGSKSGTS |
| | | ASLAITGLQAEDEADYYCQSYDSSLSGSVFGGGTK |
| | | LTVLG |
| 15058 | 195 | ESVLTQPPSVSGAPGQRVTISCTGSSSNIGAGHDVH |
| | | WYQQLPGTAPKLLISGNSNRPSGVPDRFSGSKSGTS |
| | | ASLAITGLQAEDEADYYCQSYDSSLSGSVFGGGTK |
| | | LTVLG |
| 15059 | 196 | ESVLTQPPSVSGAPGQRVTISCTGSSSNIGAGHDVH |
| | | WYQQLPGTAPKLLISGNSNRPSGVPDRFSGSKSGTS |
| | | ASLAITGLQAEDEADYYCQSYDSSLSGSVFGGGTK |
| | | LTVLG |
| 15065 | 197 | ESVLTQPPSVSGAPGQRVTISCTGSSSNIGAGHDVH |
| | | WYQQLPGTAPKLLISGNSNRPSGVPDRFSGSKSGTS |
| | | ASLAITGLQAEDEADYYCQSYDSSLSGSVFGGGTK |
| | | LTVLG |
| 15079 | 198 | ESVLTQPPSVSGAPGQRVTISCTGSSSNIGAGYDVH |
| | | WYQQLPGTAPKLLISGNSNRPSGVPDRFSGSKSGTS |
| | | ASLAITGLQAEDEADYYCOSYDSSLHGSVFGGGTK |
| | | LTVLG |
| 15080 | 199 | ESVLTQPPSVSGAPGQRVTISCTGSSSNIGAGYDVH |
| | | WYQQLPGTAPKLLISGNSNRPSGVPDRFSGSKSGTS |
| | | ASLAITGLQAEDEADYYCQSYDSSLHGSVFGGGTK |
| | | LTVLG |
| 15087 | 200 | ESVLTQPPSVSGAPGQRVTISCTGSSSNTGAGYDVH |
| | | WYQQLPGTAPKLLISGNSNRPSGVPDRFSGSKSGTS |
| | | ASLAITGLQAEDEADYYCQSYDSSLHGSVFGGGTK |
| | | LTVLG |
| 15101 | 201 | ESVLTQPPSVSGAPGQRVTISCTGSSSNIGAGYDVH |
| | | WYQQLPGTAPKLLISGNSNRPSGVPDRFSGSKSGTS |
| | | ASLAITGLQAEDEADYYCQSYDSSLSGSVFGGGTK |
| | | LTVLG |
| 15103 | 202 | ESVLTQPPSVSGAPGQRVTISCTGSSSNIGAGYDVH |
| | | WYQQLPGTAPKLLISGNSNRPSGVPDRFSGSKSGTS |
| | | ASLAITGLQAEDEADYYCQSYDSSLSGSVFGGGTK |
| | | LTVLG |
| 15104 | 203 | ESVLTQPPSVSGAPGQRVTISCTGSSSNIGAGYDVH |
| | | WYQQLPGTAPKLLISGNSNRPSGVPDRFSGSKSGTS |
| | | ASLAITGLQAEDEADYYCQSYDSSLSGSVFGGGTK |
| | | LTVLG |
| 15105 | 204 | ESVLTQPPSVSGAPGQRVTISCTGSSSNIGAGYDVH |
| | | WYQQLPGTAPKLLISGNSNRPSGVPDRFSGSKSGTS |
| | | ASLAITGLQAEDEADYYCQSYDSSLSGSVFGGGTK |
| | | LTVLG |
| 15106 | 205 | ESVLTQPPSVSGAPGQRVTISCTGSSSNIGAGYDVH |
| | | WYQQLPGTAPKLLISGNSNRPSGVPDRFSGSKSGTS |
| | | ASLAITGLQAEDEADYYCQSYDSSLSGSVFGGGTK |
| | | LTVLG |
| 15108 | 206 | ESVLTQPPSVSGAPGQRVTISCTGSSSNIGAGYDVH |
| | | WYQQLPGTAPKLLISGNSNRPSGVPDRFSGSKSGTS |
| | | ASLAITGLQAEDEADYYCQSYDSSLSGSVFGGGTK |
| | | LTVLG |
| 15112 | 207 | ESVLTQPPSVSGAPGQRVTISCTGSSSNIGAGYDVH |
| | | WYQQLPGTAPKLLISGNSNRPSGVPDRFSGSKSGTS |
| | | ASLAITGLQAEDEADYYCQSYDSSLSGSVFGGGTK |
| | | LTVLG |
| 15113 | 208 | ESVLTQPPSVSGAPGQRVTISCTGSSSNIGAGYDVH |
| | | WYQQLPGTAPKLLISGNSNRPSGVPDRFSGSKSGTS |
| | | ASLAITGLQAEDEADYYCQSYDSSLSGSVFGGGTK |
| | | LTVLG |
| 15114 | 209 | ESVLTQPPSVSGAPGQRVTISCTGSSSNIGAGYDVH |
| | | WYQQLPGTAPKLLISGNSNRPSGVPDRFSGSKSGTS |
| | | ASLAITGLQAEDEADYYCQSYDSSLSGSVFGGGTK |
| | | LTVLG |
| 15117 | 210 | ESVLTQPPSVSGAPGQRVTISCTGSSSNIGAGYDVH |
| | | WYQQLPGTAPKLLISGNSNRPSGVPDRFSGSKSGTS |
| | | ASLAITGLQAEDEADYYCQSYDSSLSGSVFGGGTK |
| | | LTVLG |
| 15121 | 211 | ESVLTQPPSVSGAPGQRVTISCTGSSSNIGAGYDVH |
| | | WYQQLPGTAPKLLISGNSNRPSGVPDRFSGSKSGTS |
| | | ASLAITGLQAEDEADYYCQSYDSSLSGSVFGGGTK |
| | | LTVLG |
| 15123 | 212 | ESVLTQPPSVSGAPGQRVTISCTGSSSNIGAGYDVH |
| | | WYQQLPGTAPKLLISGNSNRPSGVPDRFSGSKSGTS |
| | | ASLAITGLQAEDEADYYCQSYDSSLSGSVFGGGTK |
| | | LTVLG |
| 15124 | 213 | ESVLTQPPSVSGAPGQRVTISCTGSSSNIGAGYDVH |
| | | WYQQLPGTAPKLLISGNSNRPSGVPDRFSGSKSGTS |
| | | ASLAITGLQAEDEADYYCQSYDSSLSGSVFGGGTK |
| | | LTVLG |
| 15126 | 214 | ESVLTQPPSVSGAPGQRVTISCTGSSSNIGAGYDVH |
| | | WYQQLPGTAPKLLISGNSNRPSGVPDRFSGSKSGTS |
| | | ASLAITGLQAEDEADYYCQSYDSSLSGSVFGGGTK |
| | | LTVLG |
| 15132 | 215 | ESVLTQPPSVSGAPGQRVTISCTGSSSNIGAGYDVH |
| | | WYQQLPGTAPKLLISGNSNRPSGVPDRFSGSKSGTS |
| | | ASLAITGLQAEDEADYYCQSYDSSLSGSVFGGGTK |
| | | LTVLG |
| 15133 | 216 | ESVLTQPPSVSGAPGQRVTISCTGSSSNIGAGYDVH |
| | | WYQQLPGTAPKLLISGNSNRPSGVPDRFSGSKSGTS |
| | | ASLAITGLQAEDEADYYCQSYDSSLSGSVFGGGTK |
| | | LTVLG |
| 15136 | 217 | ESVLTQPPSVSGAPGQRVTISCTGSSSNIGAGYDVH |
| | | WYQQLPGTAPKLLISGNSNRPSGVPDRFSGSKSGTS |
| | | ASLAITGLQAEDEADYYCQSYDSSLSGSVFGGGTK |
| | | LTVLG |
| 15139 | 218 | ESVLTQPPSVSGAPGQRVTISCTGSSSNIGAGYDVH |
| | | WYQQLPGTAPKLLISGNSNRPSGVPDRFSGSKSGTS |
| | | ASLAITGLQAEDEADYYCQSYDSSLSGSVFGGGTK |
| | | LTVLG |
| 15140 | 219 | ESVLTQPPSVSGAPGQRVTISCTGSSSNIGAGYDVH |
| | | WYQQLPGTAPKLLISGNSNRPSGVPDRFSGSKSGTS |
| | | ASLAITGLQAEDEADYYCQSYDSSLSGSVFGGGTK |
| | | LTVLG |
| 15141 | 220 | ESVLTQPPSVSGAPGQRVTISCTGSSSNIGAGYDVH |
| | | WYQQLPGTAPKLLISGNSNRPSGVPDRFSGSKSGTS |
| | | ASLAITGLQAEDEADYYCQSYDSSLSGSVFGGGTK |
| | | LTVLG |
| SS-13983 | 221 | DIVMTQSPLSLPVTPGEPASISCRSSQSLLHSNGHNY |
| A01 | | LDWYLQKPGQSPQLLIYLG-LNRASGVPDRFSGSGS |
| | | GTDFTLKISRVEAEDVGVYYCMQALQTPLTFGGGT |
| | | KVEIKR |
| SS-13991 | 222 | DIVMTQSPLSLPVTPGEPASISCRSSQSLLHSNGHNY |
| A02 | | LDWYLQKPGQSPQLLIYLGLNRAHGVPDRFSGSGS |
| | | GTDFTLKISRVEAEDVGVYYCMQALQTPLTFGGGT |
| | | KVEIKR |
| SS-13993 | 223 | DIVMTQSPLSLPVTPGEPASISCRSSQSLLHSNGHNY |
| C02 | | LDWYLQKPGQSPQLLIYLGLNRASGVPDRFSGSGH |
| | | GTDFTLKISRVEAEDVGVYYCMQALQTPLTFGGGT |
| | | KVEIKR |
| SS-12685 | 224 | DIVMTQSPLSLPVTPGEPASISCRSSQSLLHSYGYNY |
| P1B1 | | LDWYLQKPGQSPQLLIYLGSNRASGVPDRFSGSGS |
| | | GTDFTLKISRVEAEDVGVYYCMQALQTPLTFGGGT |
| | | KVEIKR |
| SS-12686 | 225 | DIVMTQSPLSLPVTPGEPASISCRSSQSLLHSFGYNY |
| P2F5 | | LDWYLQKPGQSPQLLIYLGSNRASGVPDRFSGSGS |
| | | GTDFTLKISRVEAEDVGVYYCMQALQTPLTFGGGT |
| | | KVEIKR |
| SS-12687 | 226 | DIVMTQSPLSLPVTPGEPASISCRSSQSLLHSNGYNY |
| P2C6 | | LDWYLQKPGQSPQLLIYLGLNRASGVPDRFSGSGS |
| | | GTDFTLKISRVEAEDVGVYYCMQALQTPLTFGGGT |
| | | KVEIKR |
| SS-14892 | 227 | DIVMTQSPLSLPVTPGEPASISCRSSQSLLHSFGYNY |
| P2F5/ | | LDWYLQKPGQSPQLLIYLGLNRASGVPDRFSGSGS |
| P2C6 | | GTDFTLKISRVEAEDVGVYYCMQALQTPLTFGGGT |
| | | KVEIKR |
| SS-15509 | 228 | DIVMTQSPLSLPVTPGEPASISCRSSQSLLHSFGYNY |
| | | LDWYLQKPGQSPQLLIYLGMNRASGVPDRFSGSGS |
| | | GTDFTLKISRVEAEDVGVYYCMQALQTPLTFGGGT |
| | | KVEIKR |
| SS-15510 | 229 | DIVMTQSPLSLPVTPGEPASISCRSSQSLLHSFGYNY |
| | | LDWYLQKPGQSPQLLIYLGFNRASGVPDRFSGSGS |
| | | GTDFTLKISRVEAEDVGVYYCMQALQTPLTFGGGT |
| | | KVEIKR |
| SS-15511 | 230 | DIVMTQSPLSLPVTPGEPASISCRSSQSLLHSFGYNY |
| | | LDWYLQKPGQSPQLLIYLGHNRASGVPDRFSGSGS |
| | | GTDFTLKISRVEAEDVGVYYCMQALQTPLTFGGGT |
| | | KVEIKR |
| SS-15512 | 231 | DIVMTQSPLSLPVTPGEPASISCRSSQSLLHSFGYNY |
| | | LDWYLQKPGQSPQLLIYLGWNRASGVPDRFSGSGS |
| | | GTDFTLKISRVEAEDVGVYYCMQALQTPLTFGGGT |
| | | KVEIKR |
| SS-15513 | 232 | DIVMTQSPLSLPVTPGEPASISCRSSQSLLHSFGYNY |
| | | LDWYLQKPGQSPQLLIYLGWNRASGVPDRFSGSGS |
| | | GTDFTLKISRVEAEDVGVYYCMQALQTPLTFGGGT |
| | | KVEIKR |
| SS-15514 | 233 | DIVMTQSPLSLPVTPGEPASISCRSSQSLLHSFGYNY |
| | | LDWYLQKPGQSPQLLIYLGQNRASGVPDRFSGSGS |
| | | GTDFTLKISRVEAEDVGVYYCMQALQTPLTFGGGT |
| | | KVEIKR |
| SS-15497 | 234 | DIVMTQSPLSLPVTPGEPASISCRSSQSLLHSGNGYN |
| | | YLDWYLQKPGQSPQLLIYLGLNRASGVPDRFSGSG |
| | | SGTDFTLKISRVEAEDVGVYYCMQAIHTPLTFGGGT |
| | | KVEIKR |
| SS-15515 | 235 | DIVMTQSPLSLPVTPGEPASISCRSSQSLLHSGNGYN |
| | | YLDWYLQKPGQSPQLLIYLGMNRASGVPDRFSGSG |
| | | SGTDFTLKISRVEAEDVGVYYCMQAIHTPLTFGGGT |
| | | KVEIKR |
| SS-15516 | 236 | DIVMTQSPLSLPVTPGEPASISCRSSQSLLHSGNGYN |
| | | YLDWYLQKPGQSPQLLIYLGFNRASGVPDRFSGSG |
| | | SGTDFTLKISRVEAEDVGVYYCMQAIHTPLTFGGGT |
| | | KVEIKR |
| SS-15517 | 237 | DIVMTQSPLSLPVTPGEPASISCRSSQSLLHSGNGYN |
| | | YLDWYLQKPGQSPQLLIYLGHNRASGVPDRFSGSG |
| | | SGTDFTLKISRVEAEDVGVYYCMQAIHTPLTFGGGT |
| | | KVEIKR |
| SS-15518 | 238 | DIVMTQSPLSLPVTPGEPASISCRSSQSLLHSGNGYN |
| | | YLDWYLQKPGQSPQLLIYLGNNRASGVPDRFSGSG |
| | | SGTDFTLKISRVEAEDVGVYYCMQAIHTPLTFGGGT |
| | | KVEIKR |
| SS-15519 | 239 | DIVMTQSPLSLPVTPGEPASISCRSSQSLLHSGNGYN |
| | | YLDWYLQKPGQSPQLLIYLGWNRASGVPDRFSGSG |
| | | SGTDFTLKISRVEAEDVGVYYCMQAIHTPLTFGGGT |
| | | KVEIKR |
| SS-15520 | 240 | DIVMTQSPLSLPVTPGEPASISCRSSQSLLHSGNGYN |
| | | YLDWYLQKPGQSPQLLIYLGQNRASGVPDRFSGSG |
| | | SGTDFTLKISRVEAEDVGVYYCMQAIHTPLTFGGGT |
| | | KVEIKR |
| SS-15522 | 241 | DIVMTQSPLSLPVTPGEPASISCRSSQSLLHSNGYNY |
| | | LDWYLQKPGQSPQLLIYLGLARASGVPDRFSGSGS |
| | | GTDFTLKISRVEAEDVGVYYCMQALQTPLTFGGGT |
| | | KVEIKR |
| SS-15524 | 242 | DIVMTQSPLSLPVTPGEPASISCRSSQSLLHSNGYNY |
| | | LDWYLQKPGQSPQLLIYLGLARASGVPDRFSGSGS |
| | | GTDFTLKISRVEAEDVGVYYCMQALQTPLTFGGGT |
| | | KVEIKR |
| SS-14835 | 243 | DIVMTQSPLSLPVTPGEPASISCRSSQSLLHSGNGYN |
| | | YLDWYLQKPGQSPQLLIYLGLNRASGVPDRFSGSG |
| | | SGTDFTLKISRVEAEDVGVYYCMQAIHTPLTFGGGT |
| | | KVEIKR |
| SS-15194 | 244 | DIVMTQSPLSLPVTPGEPASISCRSSQSLLHSNGHNY |
| | | LDWYLQKPGQSPQLLIYLGLNRASGVPDRFSGSGS |
| | | GTDFTLKISRVEAEDVGVYYCMQALQTPLTFGGGT |
| | | KVEIKR |
| SS-15195 | 245 | DIVMTQSPLSLPWPGEPASISCRSSQSLLHSNGHNY |
| | | LDWYLQKPGQSPQLLIYLGLNRAHGVPDRFSGSGS |
| | | GTDFTLKISRVEAEDVGVYYCMQALQTPLTFGGGT |
| | | KVEIKR |
| SS-15196 | 246 | DIVMTQSPLSLPVTPGEPASISCRSSQSLLHSGNGYN |
| | | YLDWYLQKPGQSPQLLIYLGLNRASGVPDRFSGSG |
| | | SGTDFTLKISRVEAEDVGVYYCMQAIHTPLTFGGGT |
| | | KVEIKR |
| SS-14894 | 247 | DIVMTQSPLSLPVTPGEPASISCRSSQSLLHSGNGYN |
| | | YLDWYLQKPGQSPQLLIYLGLNRASGVPDRFSGSG |
| | | SGTDFTLKISRVEAEDVGVYYCMQALQTPLTFGGG |
| | | TKVETKR |
| SS-15504 | 248 | DIVMTQSPLSLPVTTGEPASISCRSSQSLLHSNGHNY |
| | | LDWYLQKPGQSPQLLIYLGLNRAHGVPDRFSGSGS |
| | | GTDFTLKISRVEAEDVGVYYCMQALQTPLTFGGGT |
| | | KVEIKR |
| SS-15494 | 249 | DIVMTQSPLSLPVTPGEPASISCRSSQSLLHSFGYNY |
| | | LDWYLQKPGQSPQLLIYLGLNRASGVPDRFSGSGS |
| | | GTDFTLKISRVEAEDVGVYYCMQALQTPLTFGGGT |
| | | KVEIKR |
| SS-14892 | 250 | DIVMTQSPLSLPVTPGEPASISCRSSQSLLHSFGYNY |
| | | LDWYLQKPGQSPQLLIYLGLNRASGVPDRFSGSGS |
| | | GTDFTLKISRVEAEDVGVYYCMQALQTPLTFGGGT |
| | | KVEIKR |
| SS-15495 | 251 | DIVMTQSPLSLPVTPGEPASISCRSSQSLLHSFGHNY |
| | | LDWYLQKPGQSPQLLIYLGLNRAHGVPDRFSGSGS |
| | | GTDFTLKISRVEAEDVGVYYCMQALQTPLTFGGGT |
| | | KVEIKR |
| SS-15496 | 252 | DIVMTQSPLSLPVTPGEPASISCRSSQSLLHSFGHNY |
| | | LDWYLQKPGQSPQLLIYLGLNRAHGVPDRFSGSGS |
| | | GTDFTLKISRVEAEDVGVYYCMQALQTPLTFGGGT |
| | | KVEIKR |
| SS-15497 | 253 | DIVMTQSPLSLPVTPGEPASISCRSSQSLLHSGNGYN |
| | | YLDWYLQKPGQSPQLLIYLGLNRASGVPDRFSGSG |
| | | SGTDFTLKISRVEAEDVGVYYCMQAIHTPLTFGGGT |
| | | KVEIKR |
| SS-15503 | 254 | DIVMTQSPLSLPVTPGEPASISCRSSQSLLHSF |
| | | GYNYLDWYLQKPGQSPQLLIYLGLNRASGV |
| | | PDRFSGSGSGTDFTLKISRVEAEDVGVYYCM |
| | | QALQTPLTFGGGTKVEIKR |
| SS-15505 | 255 | DIVMTQSPLSLPVTPGEPASISCRSSQSLLHSN |
| | | GHNYLDWYLQKPGQSPQLLIYLGLNRAHGV |
| | | PDRFSGSGSGTDFTLKISRVEAEDVGVYYCM |
| | | QALQTPLTFGGGTKVEIKR |
| SS-15506 | 256 | DIVMTQSPLSLPWPGEPASISCRSSQSLLHSNGHNY |
| | | LDWYLQKPGQSPQLLIYLGLNRAHGVPDRFSGSGS |
| | | GTDFTLKISRVEAEDVGVYYCMQALQTPLTFGGGT |
| | | KVEIKR |
| SS-15507 | 257 | DIVMTQSPLSLPVTPGEPASTSCRSSQSLLHSFGYNY |
| | | LDWYLQKPGQSPQLLIYLGLNRASGVPDRFSGSGS |
| | | GTDFTLKISRVEAEDVGVYYCMQALQTPLTFGGGT |
| | | KVEIKR |
| SS-15502 | 258 | DIVMTQSPLSLPVTPGEPASISCRSSQSLLHSFGYNY |
| | | LDWYLQKPGQSPQLLIYLGLNRASGVPDRFSGSGS |
| | | GTDFTLKISRVEAEDVGVYYCMQALQTPLTFGGGT |
| | | KVEIKR |
| SS-15508 | 259 | DIVMTQSPLSLPVTPGEPASISCRSSQSLLHSFGHNY |
| | | LDWYLQKPGQSPQLLIYLGLNRAHGVPDRFSGSGS |
| | | GTDFTLKISRVEAEDVGVYYCMQALQTPLTFGGGT |
| | | KVEIKR |
| SS-15501 | 260 | DIVMTQSPLSLPVTPGEPASISCRSSQSLLHSYGHNY |
| | | LDWYLQKPGQSPQLLIYLGLNRAHGVPDRFSGSGS |
| | | GTDFTLKISRVEAEDVGVYYCMQALQTPLTFGGGT |
| | | KVEIKR |
| SS-15500 | 261 | DIVMTQSPLSLPVTPGEPASISCRSSQSLLHSYGHNY |
| | | LDWYLQKPGQSPQLLIYLGLNRAHGVPDRFSGSGS |
| | | GTDFTLKISRVEAEDVGVYYCMQALQTPLTFGGGT |
| | | KVEIKR |
| SS-15003 | 262 | ESVLTQPPSVSAAPGQKVTISCSGSSSNIGNNFVSW |
| | | YQQLPGTAPKLLIYDYNKRPSGIPDRFSGSKSGTSA |
| | | TLGITGLQTGDEADYYCGTWDSSLSAYVFGTGTRV |
| | | TVLG |
| SS-15005 | 263 | DIQMTQSPSSLSASVGDRVTITCRASQSISIYLNWYQ |
| | | QKPGKAPYLLIYAAASLQSGVPSRFSGSGSGTDFTL |
| | | TISSLQPEDFATYYCQQSYSAPITFGQGTRLEIKR |
| SS-15757 | 264 | DIVMTQSPLSLPVTPGEPASISCRSSQSLLFTSNGYNY |
| (P1F4) | | LDWYLQKPGQSPQLLIYLGSNRASGVPDRFSGSGS |
| | | GTDFTLKISRVEAEDVGVYYCMQAMQTPLTFGGGT |
| | | KVEIKR |
| SS-15758 | 265 | DIVMTQSPLSLPWPGEPASISCRSSQSLLHSNGYNY |
| (P1B6) | | LDWYLQKPGQSPQLLIYLGSNRASGVPDRFSGSGS |
| | | GTDFTLKISRVEAEDVGVYYCMQALQTPLTFGGGT |
| | | KVEIKR |
| SS-15759 | 266 | DIVMTQSPLSLPVTPGEPASISCRSSQSLLHSNMYNY |
| (P2F4) | | LDWYLQKPGQSPQLLIYLGSNRASGVPDRFSGSGS |
| | | GTDFTLKISRVEAEDVGVYYCMQALQTPLTFGGGT |
| | | KVEIKR |
| SS-15761 | 267 | DIVMTQSPLSLPVTPGEPASISCRSSQSLLHSNQYNY |
| (P2G5) | | LDWYLQKPGQSPQLLIYLGSNRASGVPDRFSGSGS |
| | | GTDFTLKISRVEAEDVGVYYCMQALQTPLTFGGGT |
| | | KVEIKR |
| SS-15763 | 268 | DIVMTQSPLSLPVTPGEPASISCRSSQSLMIISNGYN |
| (P2H7) | | YLDWYLQKPGQSPQLLIYLGSNRASGVPDRFSGSG |
| | | SGTDFTLKISRVEAEDVGVYYCMQALQTPLTFGGG |
| | | TKVEIKR |
| SS-15764 | 269 | DIVMTQSPLSLPVTPGEPASISCRSSQSLLHSNGYNY |
| (P2H8) | | LDWYLQKPGQSPQLLIYLGINRASGVPDRFSGSGSG |
| | | TDFTLKISRVEAEDVGVYYCMQALQTPLTFGGGTK |
| | | VEIKR |

TABLE 2B
Exemplary Antibody Variable Heavy (V_{H}) Chains

| | SEQ ID | |
|---|---|---|
| Ab ID | NO: | Amino Acid Sequence |
| SS-13406 | 270 | EVQLVESGGGLVQPGGSLRLSCAASGFTFSSYWMS |
| (8A3HLE- | | WVRQAPGKGLEWVASIKQDGSEKYYVDSVKGRFT |
| 51) | | ISRDNARNSLYLQMNSLRAEDTAVYYCARDLVLM |
| | | VYDIDYYYYGMDVWGQGTTVTVSS |
| SS-13407 | 271 | EVQLVESGGGLVQPGGSLRLSCAASGFTFSSYWMS |
| (8A3HLE- | | WVRQAPGKGLEWVASIKQDGSEKYYVDSVKGRFT |
| 112) | | ISRDNARNSLYLQMNSLRAEDTAVYYCARDLVLM |
| | | VYDIDYYYYGMDVWGQGTTVTVSS |
| SS-14888 | 272 | EVQLVESGGGLVQPGGSLRLSCAASGFTFSSYWMS |
| (P2C6- | | WVRQAPGKGLEWVASIKQDGSEKYYVDSVKGRFT |
| HLE51) | | ISRDNARNSLYLQMNSLRAEDTAVYYCARDLVLM |
| | | VYDMDYYYYGMDVWGQGTTVTVSS |
| 13G9 | 273 | QVQLVQSGAEVTKPGASVKVSCKASGYTFTSYGIS |
| | | WVRQAPGQGLEWMGWISVYKGNTNYAQKLQGRV |
| | | TMTTDTSTSTAYMELRSLRSDDTAVYYCARNYQIF |
| | | SFDYWGQGTLVTVSS |
| 19A12 | 274 | QVQLVESGGGVVQPGRSLRLSCAASGFTFSSYGMH |
| | | WVRQAPGKGLEWVAVIWYDGSNKYYADSVKGRF |
| | | TISRDNSKNTLYLQMNSLRAEDTAVYYCVRDRGLD |
| | | WGQGTLVTVSS |
| 20D12 | 275 | QVQLQQWGAGLLKPSETLSLTCAVSGGSFRAYYW |
| | | NWIRQPPGKGLEWIGEINHSGRTDYNPSLKSRVTIS |
| | | VDTSKNQFSLKLSSVTAADTAVYYCARGQLVPFDY |
| | | WGQGTLVTVSS |
| 25B5 | 276 | QIQLVQSGAEVKKPGASVKVSCKASGYTLTSYGIS |
| | | WVRQAPGQGLEWMGWISFYNGNTNYAQKVQGRV |
| | | TMTTDTSTSTVYMELRSLRSDDTAVYFCARGYGM |
| | | DVWGQGTTVTVSS |
| 30G7 | 277 | QVQLVQSGAEVKKSGASVKVSCKASGYTLTSYGIS |
| | | WVRQAPGQGLEWMGWISVYNGNTNYAQKVQGR |
| | | VTMTTDTSTSTVYMEVRSLRSDDTAVYYCARGYG |
| | | MDVWGQGTTVTVSS |
| SS-15057 | 278 | EVQLVESGGGLVKPGGSLRLSCAASGFTHSSYSMN |
| | | WVRQAPGKGLEWVSSISSSSSYISYADSVKGRFTIS |
| | | RDNAKNSLYLQMNSLRAEDTAVYFCARDYDFHSA |
| | | YYDAFDVWGQGTMVTVSS |
| 15058 | 279 | EVQLVESGGGLVKPGGSLRLSCAASGFTFSSHSMN |
| | | WVRQAPGKGLEWVSSISSSSSYISYADSVKGRFTIS |
| | | RDNAKNSLYLQMNSLRAEDTAVYFCARDYDFHSA |
| | | YYDAFDVWGQGTMVTVSS |
| 15059 | 280 | EVQLVESGGGLVKPGGSLRLSCAASGFTFSSYSMN |
| | | WVRQAPGKGLEWVSSISSHSSYISYADSVKGRFTIS |
| | | RDNAKNSLYLQMNSLRAEDTAVYFCARDYDFHSA |
| | | YYDAFDVWGQGTMVTVSS |
| 15065 | 281 | EVQLVESGGGLVKPGGSLRLSCAASGFTFSSYSMN |
| | | WVRQAPGKGLEWVSSISSSSSYISYADSVKGRFTIS |
| | | RDNAKNSLYLQMNSLRAEDTAVYFCARDYDFHSA |
| | | HYDAFDVWGQGTMVTVSS |
| 15079 | 282 | EVQLVESGGGLVKPGGSLRLSCAASGFTHSSYSMN |
| | | WVRQAPGKGLEWVSSISSSSSYISYADSVKGRFTIS |
| | | RDNAKNSLYLQMNSLRAEDTAVYFCARDYDFHSA |
| | | YYDAFDVWGQGTMVTVSS |
| 15080 | 283 | EVQLVESGGGLVKPGGSLRLSCAASGFTFSSHSMN |
| | | WVRQAPGKGLEWVSSISSSSSYISYADSVKGRFTIS |
| | | RDNAKNSLYLQMNSLRAEDTAVYFCARDYDFHSA |
| | | YYDAFDVWGQGTMVTVSS |
| 15087 | 284 | EVQLVESGGGLVKPGGSLRLSCAASGFTFSSYSMN |
| | | WVRQAPGKGLEWVSSISSSSSYISYADSVKGRFTIS |
| | | RDNAKNSLYLQMNSLRAEDTAVYFCARDYDFHSA |
| | | HYDAFDVWGQGTMVTVSS |
| 15101 | 285 | EVQLVESGGGLVKPGGSLRLSCAASGFTHSSYSMN |
| | | WVRQAPGKGLEWVSSISSSSHYISYADSVKGRFTIS |
| | | RDNAKNSLYLQMNSLRAEDTAVYFCARDYDFHSA |
| | | YYDAFDVWGQGTMVTVSS |
| 15103 | 286 | EVQLVESGGGLVKPGGSLRLSCAASGFTHSSYSMN |
| | | WVRQAPGKGLEWVSSISSSSSYISHADSVKGRFTIS |
| | | RDNAKNSLYLQMNSLRAEDTAVYFCARDYDFHSA |
| | | YYDAFDVWGQGTMVTVSS |
| 15104 | 287 | EVQLVESGGGLVKPGGSLRLSCAASGFTHSSYSMN |
| | | WVRQAPGKGLEWVSSISSSSSYISYAHSVKGRFTIS |
| | | RDNAKNSLYLQMNSLRAEDTAVYFCARDYDFHSA |
| | | YYDAFDVWGQGTMVTVSS |
| 15105 | 288 | EVQLVESGGGLVKPGGSLRLSCAASGFTHSSYSMN |
| | | WVRQAPGKGLEWVSSISSSSSYISYADHVKGRFTIS |
| | | RDNAKNSLYLQMNSLRAEDTAVYFCARDYDFHSA |
| | | YYDAFDVWGQGTMVTVSS |
| 15106 | 289 | EVQLVESGGGLVKPGGSLRLSCAASGFTHSSYSMN |
| | | WVRQAPGKGLEWVSSISSSSSYISYADSVKGRFTIS |
| | | RDNAKNSLYLQMNSLRAEDTAVYFCARDYDFHSA |
| | | HYDAFDVWGQGTMVTVSS |
| 15108 | 290 | EVQLVESGGGLVKPGGSLRLSCAASGFTFSSHSMN |
| | | WVRQAPGKGLEWVSSISSHSSYISYADSVKGRFTIS |
| | | RDNAKNSLYLQMNSLRAEDTAVYFCARDYDFHSA |
| | | YYDAFDVWGQGTMVTVSS |
| 15112 | 291 | EVQLVESGGGLVKPGGSLRLSCAASGFTFSSHSMN |
| | | WVRQAPGKGLEWVSSISSSSSYISYAHSVKGRFTIS |
| | | RDNAKNSLYLQMNSLRAEDTAVYFCARDYDFHSA |
| | | YYDAFDVWGQGTMVTVSS |
| 15113 | 292 | EVQLVESGGGLVKPGGSLRLSCAASGFTFSSHSMN |
| | | WVRQAPGKGLEWVSSISSSSSYISYADHVKGRFTIS |
| | | RDNAKNSLYLQMNSLRAEDTAVYFCARDYDFHSA |
| | | YYDAFDVWGQGTMVTVSS |
| 15114 | 293 | EVQLVESGGGLVKPGGSLRLSCAASGFTFSSHSMN |
| | | WVRQAPGKGLEWVSSISSSSSYISYADSVKGRFTIS |
| | | RDNAKNSLYLQMNSLRAEDTAVYFCARDYDFHSA |
| | | HYDAFDVWGQGTMVTVSS |
| 15117 | 294 | EVQLVESGGGLVKPGGSLRLSCAASGFTFSSYSMN |
| | | WVRQAPGKGLEWVSSISSHSSYHSYADSVKGRFTIS |
| | | RDNAKNSLYLQMNSLRAEDTAVYFCARDYDFHSA |
| | | YYDAFDVWGQGTMVTVSS |
| 15121 | 295 | EVQLVESGGGLVKPGGSLRLSCAASGFTFSSYSMN |
| | | WVRQAPGKGLEWVSSISSHSSYISYADSVKGRFTIS |
| | | RDNAKNSLYLQMNSLRAEDTAVYFCARDYDFHSA |
| | | HYDAFDVWGQGTMVTVSS |
| 15123 | 296 | EVQLVESGGGLVKPGGSLRLSCAASGFTFSSYSMN |
| | | WVRQAPGKGLEWVSSISSSSHYHSYADSVKGRFTIS |
| | | RDNAKNSLYLQMNSLRAEDTAVYFCARDYDFHSA |
| | | YYDAFDVWGQGTMVTVSS |
| 15124 | 297 | EVQLVESGGGLVKPGGSLRLSCAASGFTFSSYSMN |
| | | WVRQAPGKGLEWVSSISSSSHYISHADSVKGRFTIS |
| | | RDNAKNSLYLQMNSLRAEDTAVYFCARDYDFHSA |
| | | YYDAFDVWGQGTMVTVSS |
| 15126 | 298 | EVQLVESGGGLVKPGGSLRLSCAASGFTFSSYSMN |
| | | WVRQAPGKGLEWVSSISSSSHYISYADHVKGRFTIS |
| | | RDNAKNSLYLQMNSLRAEDTAVYFCARDYDFHSA |
| | | YYDAFDVWGQGTMVTVSS |
| 15132 | 299 | EVQLVESGGGLVKPGGSLRLSCAASGFTFSSYSMN |
| | | WVRQAPGKGLEWVSSISSSSSYHSYADSVKGRFTIS |
| | | RDNAKNSLYLQMNSLRAEDTAVYFCARDYDFHSA |
| | | HYDAFDVWGQGTMVTVSS |
| 15133 | 300 | EVQLVESGGGLVKPGGSLRLSCAASGFTFSSYSMN |
| | | WVRQAPGKGLEWVSSISSSSSYHSYADSVKGRFTIS |
| | | RDNAKNSLYLQMNSLRAEDTAVYFCARDYDFHSA |
| | | YHDAFDVWGQGTMVTVSS |
| 15136 | 301 | EVQLVESGGGLVKPGGSLRLSCAASGFTFSSYSMN |
| | | WVRQAPGKGLEWVSSISSSSSYISHADSVKGRFTIS |
| | | RDNAKNSLYLQMNSLRAEDTAVYFCARDYDFHSA |
| | | HYDAFDVWGQGTMVTVSS |
| 15139 | 302 | EVQLVESGGGLVKPGGSLRLSCAASGFTFSSYSMN |
| | | WVRQAPGKGLEWVSSISSSSSYISYAHSVKGRFTIS |
| | | RDNAKNSLYLQMNSLRAEDTAVYFCARDYDFHSA |
| | | HYDAFDVWGQGTMVTVSS |
| 15140 | 303 | EVQLVESGGGLVKPGGSLRLSCAASGFTFSSYSMN |
| | | WVRQAPGKGLEWVSSISSSSSYISYAHSVKGRFTIS |
| | | RDNAKNSLYLQMNSLRAEDTAVYFCARDYDFHSA |
| | | YHDAFDVWGQGTMVTVSS |
| 15141 | 304 | EVQLVESGGGLVKPGGSLRLSCAASGFTFSSYSMN |
| | | WVRQAPGKGLEWVSSISSSSSYISYADHVKGRFTIS |
| | | RDNAKNSLYLQMNSLRAEDTAVYFCARDYDFHSA |
| | | HYDAFDVWGQGTMVTVSS |
| SS-13983 | 305 | EVQLVESGGGLVQPGGSLRLSCAASGFTFSSYWMS |
| A01 | | WVRQAPGKGLEWVASIKQDGSEKYYVDSVKGRFT |
| | | ISRDNARNSLYLQMNSLRAEDTAVYYCARDLVLM |
| | | VYDIDYYYYGMDVWGQGTTVTVSS |
| SS-13991 | 306 | EVQLVESGGGLVQPGGSLRLSCAASGFTFSSYWMS |
| A02 | | WVRQAPGKGLEWVASIKQDGSEKYYVDSVKGRFT |
| | | ISRDNARNSLYLQMNSLRAEDTAVYYCARDLVLM |
| | | VYDIDYYYYGMDVWGQGTTVTVSS |
| SS-13993 | 307 | EVQLVESGGGLVQPGGSLRLSCAASGFTFSSYWMS |
| C02 | | WVRQAPGKGLEWVASIKQDGSEKYYVDSVKGRFT |
| | | ISRDNARNSLYLQMNSLRAEDTAVYYCARDLVLM |
| | | VYDIDYYYYGMDVWGQGTTVTVSS |
| SS-12685 | 308 | EVQLVESGGGLVQPGGSLRLSCAASGFTFSSYWMS |
| P1B1 | | WVRQAPGKGLEWVASIKQDGSEKYYVDSVKGRFT |
| | | ISRDNARNSLYLQMNSLRAEDTAVYYCARDLVLM |
| | | VYDMDYYYYGMDVWGQGTTVTVSS |
| SS-12686 | 309 | EVQLVESGGGLVQPGGSLRLSCAASGFTFSSYWMS |
| P2F5 | | WVRQAPGKGLEWVASIKQDGSEKYYVDSVKGRFT |
| | | ISRDNARNSLYLQMNSLRAEDTAVYYCARDLVLM |
| | | VYDMDYYYYGMDVWGQGTTVTVSS |
| SS-12687 | 310 | EVQLVESGGGLVQPGGSLRLSCAASGFTFSSYWMS |
| P2C6 | | WVRQAPGKGLEWVASIKQDGSEKYYVDSVKGRFT |
| | | ISRDNARNSLYLQMNSLRAEDTAVYYCARDLVLM |
| | | VYDMDYYYYGMDVWGQGTTVTVSS |
| SS-14892 | 311 | EVQLVESGGGLVQPGGSLRLSCAASGFTFSSYWMS |
| | | WVRQAPGKGLEWVASIKQDGSEKYYVDSVKGRFT |
| | | ISRDNARNSLYLQMNSLRAEDTAVYYCARDLVLM |
| | | VYDMDYYYYGMDVWGQGTTVTVSS |
| SS-15509 | 312 | EVQLVESGGGLVQPGGSLRLSCAASGFTFSSYWMS |
| | | WVRQAPGKGLEWVASIKQDGSEKYYVDSVKGRFT |
| | | ISRDNARNSLYLQMNSLRAEDTAVYYCARDLVLFV |
| | | YDMDYYYYGMDVWGQGTTVTVSS |
| SS-15510 | 313 | EVQLVESGGGLVQPGGSLRLSCAASGFTFSSYWMS |
| | | WVRQAPGKGLEWVASIKQDGSEKYYVDSVKGRFT |
| | | ISRDNARNSLYLQMNSLRAEDTAVYYCARDLVLFV |
| | | YDMDYYYYGMDVWGQGTTVTVSS |
| SS-15511 | 314 | EVQLVESGGGLVQPGGSLRLSCAASGFTFSSYWMS |
| | | WVRQAPGKGLEWVASIKQDGSEKYYVDSVKGRFT |
| | | ISRDNARNSLYLQMNSLRAEDTAVYYCARDLVLFV |
| | | YDMDYYYYGMDVWGQGTTVTVSS |
| SS-15512 | 315 | EVQLVESGGGLVQPGGSLRLSCAASGFTFSSYWMS |
| | | WVRQAPGKGLEWVASIKQDGSEKYYVDSVKGRFT |
| | | ISRDNARNSLYLQMNSLRAEDTAVYYCARDLVLFV |
| | | YDMDYYYYGMDVWGQGTTVTVSS |
| SS-15513 | 316 | EVQLVESGGGLVQPGGSLRLSCAASGFTFSSYWMS |
| | | WVRQAPGKGLEWVASIKQDGSEKYYVDSVKGRFT |
| | | ISRDNARNSLYLQMNSLRAEDTAVYYCARDLVLFV |
| | | YDMDYYYYGMDVWGQGTTVTVSS |
| SS-15514 | 317 | EVQLVESGGGLVQPGGSLRLSCAASGFTFSSYWMS |
| | | WVRQAPGKGLEWVASIKQDGSEKYYVDSVKGRFT |
| | | ISRDNARNSLYLQMNSLRAEDTAVYYCARDLVLFV |
| | | YDMDYYYYGMDVWGQGTTVTVSS |
| SS-15497 | 318 | EVQLVESGGGLVQPGGSLRLSCAASGFTFSSYWMS |
| | | WVRQAPGKGLEWVASIKQDGSEKYYVDSVKGRFT |
| | | ISRDNARNSLYLQMNSLRAEDTAVYYCARDLVLSV |
| | | YDMDYYYYGMDVWGQGTTVTVSS |
| SS-15515 | 319 | EVQLVESGGGLVQPGGSLRLSCAASGFTFSSYWMS |
| | | WVRQAPGKGLEWVASIKQDGSEKYYVDSVKGRFT |
| | | ISRDNARNSLYLQMNSLRAEDTAVYYCARDLVLSV |
| | | YDMDYYYYGMDVWGQGTTVTVSS |
| SS-15516 | 320 | EVQLVESGGGLVQPGGSLRLSCAASGFTFSSYWMS |
| | | WVRQAPGKGLEWVASIKQDGSEKYYVDSVKGRFT |
| | | ISRDNARNSLYLQMNSLRAEDTAVYYCARDLVLSV |
| | | YDMDYYYYGMDVWGQGTTVTVSS |
| SS-15517 | 321 | EVQLVESGGGLVQPGGSLRLSCAASGFTFSSYWMS |
| | | WVRQAPGKGLEWVASIKQDGSEKYYVDSVKGRFT |
| | | ISRDNARNSLYLQMNSLRAEDTAVYYCARDLVLSV |
| | | YDMDYYYYGMDVWGQGTTVTVSS |
| SS-15518 | 322 | EVQLVESGGGLVQPGGSLRLSCAASGFTFSSYWMS |
| | | WVRQAPGKGLEWVASIKQDGSEKYYVDSVKGRFT |
| | | ISRDNARNSLYLQMNSLRAEDTAVYYCARDLVLSV |
| | | YDMDYYYYGMDVWGQGTTVTVSS |
| SS-15519 | 323 | EVQLVESGGGLVQPGGSLRLSCAASGFTFSSYWMS |
| | | WVRQAPGKGLEWVASIKQDGSEKYYVDSVKGRFT |
| | | ISRDNARNSLYLQMNSLRAEDTAVYYCARDLVLSV |
| | | YDMDYYYYGMDVWGQGTTVTVSS |
| SS-15520 | 324 | EVQLVESGGGLVQPGGSLRLSCAASGFTFSSYWMS |
| | | WVRQAPGKGLEWVASIKQDGSEKYYVDSVKGRFT |
| | | ISRDNARNSLYLQMNSLRAEDTAVYYCARDLVLSV |
| | | YDMDYYYYGMDVWGQGTTVTVSS |
| SS-15522 | 325 | EVQLVESGGGLVQPGGSLRLSCAASGFTFSSYWMS |
| | | WVRQAPGKGLEWVASIKQDGSEKYYVDSVKGRFT |
| | | ISRDNARNSLYLQMNSLRAEDTAVYYCARDLVLSV |
| | | YDMDYYYYGMDVWGQGTTVTVSS |
| SS-15524 | 326 | EVQLVESGGGLVQPGGSLRLSCAASGFTFSSYWMS |
| | | WVRQAPGKGLEWVASIKQDGSEKYYVDSVKGRFT |
| | | ISRDNARNSLYLQMNSLRAEDTAVYYCARDLVLFV |
| | | YDMDYYYYGMDVWGQGTTVTVSS |
| SS-14835 | 327 | EVQLVESGGGLVQPGGSLRLSCAASGFTFSSYWMS |
| | | WVRQAPGKGLEWVASIKQDGSEKYYVDSVKGRFT |
| | | ISRDNARNSLYLQMNSLRAEDTAVYYCARDLVLM |
| | | VYDIDYYYYGMDVWGQGTTVTVSS |
| SS-15194 | 328 | EVQLVESGGGLVQPGGSLRLSCAASGFTFSSYWMS |
| | | WVRQAPGKGLEWVASIKQDGSEKYYVDSVKGRFT |
| | | ISRDNARNSLYLQMNSLRAEDTAVYYCARDLVLM |
| | | VYDMDYYYYGMDVWGQGTTVTVSS |
| SS-15195 | 329 | EVQLVESGGGLVQPGGSLRLSCAASGFTFSSYWMS |
| | | WVRQAPGKGLEWVASIKQDGSEKYYVDSVKGRFT |
| | | ISRDNARNSLYLQMNSLRAEDTAVYYCARDLVLM |
| | | VYDMDYYYYGMDVWGQGTTVTVSS |
| SS-15196 | 330 | EVQLVESGGGLVQPGGSLRLSCAASGFTFSSYWMS |
| | | WVRQAPGKGLEWVASIKQDGSEKYYVDSVKGRFT |
| | | ISRDNARNSLYLQMNSLRAEDTAVYYCARDLVLM |
| | | VYDMDYYYYGMDVWGQGTTVTVSS |
| SS-14894 | 331 | EVQLVESGGGLVQPGGSLRLSCAASGFTFSSYWMS |
| | | WVRQAPGKGLEWVASIKQDGSEKYYVDSVKGRFT |
| | | ISRDNARNSLYLQMNSLRAEDTAVYYCARDLVLM |
| | | VYDMDYYYYGMDVWGQGTTVTVSS |
| SS-15504 | 332 | EVQLVESGGGLVQPGGSLRLSCAASGFTFSSYWMS |
| | | WVRQAPGKGLEWVASIKQDGSEKYYVDSVKGRFT |
| | | ISRDNARNSLYLQMNSLRAEDTAVYYCARDLVLSV |
| | | YDMDYYYYGMDVWGQGTTVTVSS |
| SS-15494 | 333 | EVQLVESGGGLVQPGGSLRLSCAASGFTFSSYWMS |
| | | WVRQAPGKGLEWVASIKQDGSEKYYVDSVKGRFT |
| | | ISRDNARNSLYLQMNSLRAEDTAVYYCARDLVLFV |
| | | YDMDYYYYGMDVWGQGTTVTVSS |
| SS-14892 | 334 | EVQLVESGGGLVQPGGSLRLSCAASGFTFSSYWMS |
| | | WVRQAPGKGLEWVASIKQDGSEKYYVDSVKGRFT |
| | | ISRDNARNSLYLQMNSLRAEDTAVYYCARDLVLM |
| | | VYDMDYYYYGMDVWGQGTTVTVSS |
| SS-15495 | 335 | EVQLVESGGGLVQPGGSLRLSCAASGFTFSSYWMS |
| | | WVRQAPGKGLEWVASIKQDGSEKYYVDSVKGRFT |
| | | ISRDNARNSLYLQMNSLRAEDTAVYYCARDLVLFV |
| | | YDMDYYYYGMDVWGQGTTVTVSS |
| SS-15496 | 336 | EVQLVESGGGLVQPGGSLRLSCAASGFTFSSYWMS |
| | | WVRQAPGKGLEWVASIKQDGSEKYYVDSVKGRFT |
| | | ISRDNARNSLYLQMNSLRAEDTAVYYCARDLVLM |
| | | VYDMDYYYYGMDVWGQGTTVTVSS |
| SS-15497 | 337 | EVQLVESGGGLVQPGGSLRLSCAASGFTFSSYWMS |
| | | WVRQAPGKGLEWVASIKQDGSEKYYVDSVKGRFT |
| | | ISRDNARNSLYLQMNSLRAEDTAVYYCARDLVLSV |
| | | YDMDYYYYGMDVWGQGTTVTVSS |
| SS-15503 | 338 | EVQLVESGGGLVQPGGSLRLSCAASGFTFSSYWMSWVRQAPGK |
| | | GLEWVAS |
| | | IKQDGSEKYYVDSVKGRFTISRDNARNSLYLQMMSLRAEDTAV |
| | | YYCARDL |
| | | VLSVYDMDYYYYGMDVWGQGTTVTVSS |
| SS-15505 | 339 | EVQLVESGGGLVQPGGSLRLSCAASGFTFSSYWMSWVRQAPGK |
| | | GLEWVAS |
| | | IKQDGSEKYYVDSVKGRFTISRDNARNSLYLQMNSLRAEDTAV |
| | | YYCARDL |
| | | VLFVYDMDYYYYGMDVWGQGTTVTVSS |
| SS-15506 | 340 | EVQLVESGGGLVQPGGSLRLSCAASGFTFSSYWMS |
| | | WVRQAPGKGLEWVASIKQDGSEKYYVDSVKGRFT |
| | | ISRDNARNSLYLQMNSLRAEDTAVYYCARDLVLN |
| | | VYDMDYYYYGMDVWGQGTTVTVSS |
| SS-15507 | 341 | EVQLVESGGGLVQPGGSLRLSCAASGFTFSSYWMS |
| | | WVRQAPGKGLEWVASIKQDGSEKYYVDSVKGRFT |
| | | ISRDNARNSLYTQMNSLRAEDTAVYYCARDLVLM |
| | | VYDIDYYYYGMDVWGQGTTVTVSS |
| SS-15502 | 342 | EVQLVESGGGLVQPGGSLRLSCAASGFTFSSYWMS |
| | | WVRQAPGKGLEWVASIKQDGSEKYYVDSVKGRFT |
| | | ISRDNARNSLYLQMNSLRAEDTAVYYCARDLVLN |
| | | VYDMDYYYYGMDVWGQGTTVTVSS |
| SS-15508 | 343 | EVQLVESGGGLVQPGGSLRLSCAASGFTFSSYWMS |
| | | WVRQAPGKGLEWVASIKQDGSEKYYVDSVKGRFT |
| | | ISRDNARNSLYLQMNSLRAEDTAVYYCARDLVLM |
| | | VYDIDYYYYGMDVWGQGTTVTVSS |
| SS-15501 | 344 | EVQLVESGGGLVQPGGSLRLSCAASGFTFSSYWMS |
| | | WVRQAPGKGLEWVASIKQDGSEKYYVDSVKGRFT |
| | | ISRDNARNSLYLQMNSLRAEDTAVYYCARDLVLSV |
| | | YDMDYYYYGMDVWGQGTTVTVSS |
| SS-15500 | 345 | EVQLVESGGGLVQPGGSLRLSCAASGFTFSSYWMS |
| | | WVRQAPGKGLEWVASIKQDGSEKYYVDSVKGRFT |
| | | ISRDNARNSLYLQMNSLRAEDTAVYYCARDLVLN |
| | | VYDMDYYYYGMDVWGQGTTVTVSS |
| SS-15003 | 346 | EVHLVESGGGVVQPGRSLRLSCAASGFTFNSFGMH |
| | | WVRQAPGKGLEWVALIWSDGSDEYYADSVKGRFT |
| | | ISRDNSKNTLYLQMNSLRAEDTAVYYCARAIAALY |
| | | YYYGMDVWGQGTTVTVSS |
| SS-15005 | 347 | EVQLLESGGGLVQPGGSLRLSCAASGFTFSSYAMN |
| | | WVRQAPGKGLEWVSTISGSGGNTYYADSVKGRFTI |
| | | SRDNSKNTLYLQMNSLRAEDTAVYYCAKKFVLMV |
| | | YAMLDYWGQGTLVTVSS |
| SS-15757 | 348 | EVQLVESGGGLVQPGGSLRLSCAASGFTFSSYWMS |
| (P1F4) | | WVRQAPGKGLEWVASIKQDGSEKYYVDSVKGRFT |
| | | ISRDNARNSLYLQMNSLRAEDTAVYYCARDLVLM |
| | | VYDIDYYYYGMDVWGQGTTVTVSS |
| SS-15758 | 349 | EVQLVESGGGLVQPGGSLRLSCAASGFTFSSYWMS |
| (P1B6) | | WVRQAPGKGLEWVASIKQDGSEKYYVDSVKGRFT |
| | | ISRDNARNSLYLQMNSLRAEDTAVYYCARDLVLM |
| | | VYDLDYYYYGMDVWGQGTTVTVSS |
| SS-15759 | 350 | EVQLVESGGGLVQPGGSLRLSCAASGFTFSSYWMS |
| (P2F4) | | WVRQAPGKGLEWVASIKQDGSEKYYVDSVKGRFT |
| | | ISRDNARNSLYLQMNSLRAEDTAVYYCARDLVLM |
| | | VYDMDYYYYGMDVWGQGTTVTVSS |
| SS-15761 | 351 | EVQLVESGGGLVQPGGSLRLSCAASGFTFSSYWMS |
| (P2G5) | | WVRQAPGKGLEWVASIKQDGSEKYYVDSVKGRFT |
| | | ISRDNARNSLYLQMNSLRAEDTAVYYCARDLVLM |
| | | VYDMDYYYYGMDVWGQGTTVTVSS |
| SS-15763 | 352 | EVQLVESGGGLVQPGGSLRLSCAASGFTFSSYWMS |
| (P2H7) | | WVRQAPGKGLEWVASIKQDGSEKYYVDSVKGRFT |
| | | ISRDNARNSLYLQMNSLRAEDTAVYYCARDLVLM |
| | | VYDMDYYYYGMDVWGQGTTVTVSS |
| SS-15764 | 353 | EVQLVESGGGLVQPGGSLRLSCAASGFTFSSYWMS |
| (P2H8) | | WVRQAPGKGLEWVASIKQDGSEKYYVDSVKGRFT |
| | | ISRDNARNSLYLQMNSLRAEDTAVYYCARDLVLM |
| | | VYDMDYYYYGMDVWGQGTTVTVSS |

TABLE 2C
Coding Sequence for Antibody Variable
Light (V_{L}) Chains

| | SEQ | |
|---|---|---|
| | ID | |
| Ab ID | NO: | Coding Sequence |
| SS-13406 | 354 | GATATTGTGATGACTCAGTCTCCACTCTCCCTGCC |
| (8A3HLE- | | CGTCACCCCTGGAGAGCCGGCCTCCATCTCCTGC |
| 51) | | AGGTCTAGTCAGAGCCTCCTGCATAGTAATGGAT |
| | | ACAACTATTTGGATTGGTACCTGCAGAAGCCAGG |
| | | GCAGTCTCCACAGCTCCTGATCTATTTGGGTTCTA |
| | | ATCGGGCCTCCGGGGTCCCTGACAGGTTCAGTGG |
| | | CAGTGGATCAGGCACAGATTTTACACTGAAAATC |
| | | AGCAGAGTGGAGGCTGAGGATGTTGGGGTTTATT |
| | | ACTGCATGCAAGCTCTACAAACTCCGCTCACTTT |
| | | CGGCGGAGGGACCAAGGTAGAGATCAAACGG |
| SS-13407 | 355 | GATATTGTGATGACTCAGTCTCCACTCTCCCTGCC |
| (8A3HLE- | | CGTCACCCCTGGAGAGCCGGCCTCCATCTCCTGC |
| 112) | | AGGTCTAGTCAGAGCCTCCTGCATAGTAATGGAT |
| | | ACAACTATTTGGATTGGTACCTGCAGAAGCCAGG |
| | | GCAGTCTCCACAGCTCCTGATCTATTTGGGTTCTA |
| | | ATCGGGCCTCCGGGGTCCCTGACAGGTTCAGTGG |
| | | CAGTGGATCAGGCACAGATTTTACACTGAAAATC |
| | | AGCAGAGTGGAGGCTGAGGATGTTGGGGTTTATT |
| | | ACTGCATGCAAGCTCTACAAACTCCGCTCACTTT |
| | | CGGCGGAGGGACCAAGGTAGAGATCAAACGG |
| SS-14888 | 356 | GATATTGTGATGACTCAGTCTCCACTCTCCCTGCC |
| (P2C6- | | CGTCACCCCTGGAGAGCCGGCCTCCATCTCCTGC |
| HLE51) | | AGGTCTAGTCAGAGCCTCCTGCATAGTAATGGAT |
| | | ACAACTATTTGGATTGGTACCTGCAGAAGCCAGG |
| | | GCAGTCTCCACAGCTCCTGATCTATTTGGGTCTCA |
| | | ATCGGGCCTCCGGGGTCCCTGACAGGTTCAGTGG |
| | | CAGTGGATCAGGCACAGATTTTACACTGAAAATC |
| | | AGCAGAGTGGAGGCTGAGGATGTTGGGGTTTATT |
| | | ACTGCATGCAAGCTGTACAAACTCCGCTCACTTT |
| | | CGGCGGAGGGACCAAGGTAGAGATCAAACGG |
| 13G9 | 357 | CAGTCTGTGCTGACGCAGCCGCCCTCAGTGTCTG |
| | | GGGCCCCAGGGCAGAGGGTCACCATCTCCTGCAC |
| | | TGGGAGCAGGTCCAACATCGGGGCAGGTTATGAT |
| | | GTAAATTGGTACCAGCAGCTTCCAGGAACAGCCC |
| | | CCAAACTCCTCATCTATGGTAACAGCAATCGGCC |
| | | CTCTGGGGTCCCTGACCGATTCTCTGGCTCCAAG |
| | | TCTGGCACCTCAGCCTCCCTGGTCATCACTGGGC |
| | | TCCAGGCTGAGGATGAGGCTGATTATTACTGCCA |
| | | GTCCTATGACAGTAACCTGAGTGGTTCGGTATTC |
| | | GGCGGAGGGACCAAGCTGACCGTCCTAGGT |
| 19A12 | 358 | GACATCGTGCTGACCCAGTCTCCAGATTTTCTGG |
| | | CTGTGTCTCTGGGCGAGAGGGCCACCATCAACTG |
| | | TAAGTCCAGCCAGAATGTTTTATACAGCTCCAGC |
| | | AATAAGAACTACTTAGTTTGGTACCAGCACAAAC |
| | | CAGGACAGCCTCCTAAACTGCTCATTTACTGGGC |
| | | ATCTACCCGGGAATCCGGGGTCCCTGACCGATTC |
| | | AGTGGCAGCGGGTCTGGGACAGATTTCACTCTCA |
| | | CCATCAGCAGCCTGCAGGCTGAAGATGTGGCAGT |
| | | TTATTACTGTCATCAATATTATAGTACTCCGTGGA |
| | | CGTTCGGCCAAGGGACCAAGGTGGAAATCAAAC |
| | | GA |
| 20D12 | 359 | CAGTCTGTGCTGACTCAGCCACCCTCAGCGTCTG |
| | | GGACCCCCGGGCAGAGGGTCACCATCTCTTGTTC |
| | | TGGAAGCAACTCCAACATCGGAAGTAATACTGTT |
| | | AACTGGTATCAGCAGGTCCCAGGAACGGCCCCCA |
| | | AACTCCTCATCTATAGTAATAATCAGCGGCCCTC |
| | | AGGGGTCCCTGACCGATTCTCTGGCTCCAAGTCT |
| | | GGCACCTCAGCCTCCCTGGCCATCAGTGGGCTCC |
| | | AGTCTGAGGATGAGGCTGATTATTACTGTGCAGC |
| | | ATGGGATGACAGCCTGAATGGTTGGGTGTTCGGC |
| | | GGAGGGACCAAGCTGACCGTCCTAGGT |
| 25B5 | 360 | CAGTCTGCCCTGACTCAGCCTGCCTCCGTGTCTG |
| | | GGTCTCCTGGACAGTCGATCACCATCTCCTGCAC |
| | | TGGAACCAGCAGTGACGTTGGTGGTTATAACTCT |
| | | GTCTCCTGGTACCAACAGCACCCAGGCAAACCCC |
| | | CCAAACTCATGATTTATGAGGTCAGTAATCGGCC |
| | | CTCAGGGATTTCTAATCGCTTCTCTGGCTCCAAGT |
| | | CTGGCAACACGGCCTCCCTGACCATCTCTGGGCT |
| | | CCAGGCTGAGGACGAGGCTGATTATTTCTGCAGC |
| | | TCATATACAAGCACCAGCATGGTCTTCGGCGGAG |
| | | GGACCAAGCTGGCCGTCCTACGT |
| 30G7 | 361 | CAGTCTGCCCTGACTCAGCCTGCCTCCGTGTCTG |
| | | GGTCTCCTGGACAGTCGATCACCATCTCCTGCAC |
| | | TGGAACCAGCAGTGACGTTGGTGGTTATAACTCT |
| | | GTCTCCTGGTACCAACAGCACCCAGGCAAACCCC |
| | | CCAAACTCATGATTTATGAGGTCAGTAATCGGCC |
| | | CTCAGGGGTTTCTAATCGCTTCTCTGGCTCCAAGT |
| | | CTGCCAACACGGCCTCCCTGACCATCTCTGGGCT |
| | | CCAGGCTGATGACGAGGCTGATTATTTCTGCAGC |
| | | TCATATACAAGCACCAGCATGGTCTTCGGCGGAG |
| | | GGACCAAGCTGACCGTCCTACGT |
| SS-15057 | 362 | GAGTCTGTGCTGACGCAGCCGCCCTCAGTGTCTG |
| | | GGGCCCCAGGGCAGAGGGTCACCATCTCCTGCAC |
| | | TGGGAGCAGCTCCAACATCGGGGCAGGTCACGA |
| | | TGTACACTGGTACCAGCAGCTTCCAGGAACAGCC |
| | | CCCAAACTCCTCATCTCTGGTAACAGCAATCGGC |
| | | CCTCAGGGGTCCCTGACCGATTCTCTGGCTCCAA |
| | | GTCTGGCACCTCAGCCTCCCTGGCCATCACTGGG |
| | | CTCCAGGCTGAGGATGAGGCTGATTATTACTGCC |
| | | AGTCCTATGACAGCAGCCTGAGTGGTTCGGTATT |
| | | CGGCGGAGGGACCAAGCTGACCGTCCTAGGT |
| 15058 | 363 | GAGTCTGTGCTGACGCAGCCGCCCTCAGTGTCTG |
| | | GGGCCCCAGGGCAGAGGGTCACCATCTCCTGCAC |
| | | TGGGAGCAGCTCCAACATCGGGGCAGGTCACGA |
| | | TGTACACTGGTACCAGCAGCTTCCAGGAACAGCC |
| | | CCCAAACTCCTCATGTCTGGTAACAGCAATCGGC |
| | | CCTCAGGGGTCCCTGACCGATTCTCTGGCTCCAA |
| | | GTCTGGCACCTCAGCCTCCCTGGCCATCACTGGG |
| | | CTCCAGGCTGAGGATGAGGCTGATTATTACTGCC |
| | | AGTCCTATGACAGCAGCCTGAGTGGTTCGGTATT |
| | | CGGCGGAGGGACCAAGCTGACCGTCCTAGGT |
| 15059 | 364 | GAGTCTGTGCTGACGCAGCCGCCCTCAGTGTCTG |
| | | GGGCCCCAGGGCAGAGGGTCACCATCTCCTGCAC |
| | | TGGGAGCAGCTCCAACATCGGGGCAGGTCACGA |
| | | TGTACACTGGTACCAGCAGCTTCCAGGAACAGCC |
| | | CCCAAACTCCTCATCTCTGGTAACAGCAATCGGC |
| | | CCTCAGGGGTCCCTGACCGATTCTCTGGCTCCAA |
| | | GTCTGGCACCTCAGCCTCCCTGGCCATCACTGGG |
| | | CTCCAGGCTGAGGATGAGGCTGATTATTACTGCC |
| | | AGTCCTATGACAGCAGCCTGAGTGGTTCGGTATT |
| | | CGGCGGAGGGACCAAGCTGACCGTCCTAGGT |
| 15065 | 365 | GAGTCTGTGCTGACGCAGCCGCCCTCAGTGTCTG |
| | | GGGCCCCAGGGCAGAGGGTCACCATCTCCTGCAC |
| | | TGGGAGCAGCTCCAACATCGGGGCAGGTCACGA |
| | | TGTACACTGGTACCAGCAGCTTCCAGGAACAGCC |
| | | CCCAAACTCCTCATCTCTGGTAACAGCAATCGGC |
| | | CCTCAGGGGTCCCTGACCGATTCTCTGGCTCCAA |
| | | GTCTGGCACCTCAGCCTCCCTGGCCATCACTGGG |
| | | CTCCAGGCTGAGGATGAGGCTGATTATTACTGCC |
| | | AGTCCTATGACAGCAGCCTGAGTGGTTCGGTATT |
| | | CGGCGGAGGGACCAAGCTGACCGTCCTAGGT |
| 15079 | 366 | GAGTCTGTGCTGACGCAGCCGCCCTCAGTGTCTG |
| | | GGGCCCCAGGGCAGAGGGTCACCATCTCCTGCAC |
| | | TGGGAGCAGCTCCAACATCGGGGCAGGTTATGAT |
| | | GTACACTGGTACCAGCAGCTTCCAGGAACAGCCC |
| | | CCAAACTCCTCATCTCTGGTAACAGCAATCGGCC |
| | | CTCAGGGGTCCCTGACCGATTCTCTGGCTCCAAG |
| | | TCTGGCACCTCAGCCTCCCTGGCCATCACTGGGC |
| | | TCCAGGCTGAGGATGAGGCTGATTATTACTGCCA |
| | | GTCCTATGACAGCAGCCTGCACGGTTCGGTATTC |
| | | GGCGGAGGGACCAAGCTGACCGTCCTAGGT |
| 15080 | 367 | GAGTCTGTGCTGACGCAGCCGCCCTCAGTGTCTG |
| | | GGGCCCCAGGGCAGAGGGTCACCATCTCCTGCAC |
| | | TGGGAGCAGCTCCAACATCGGGGCAGGTTATGAT |
| | | GTACACTGGTACCAGCAGCTTCCAGGAACAGCCC |
| | | CCAAACTCCTCATCTCTGGTAACAGCAATCGGCC |
| | | CTCAGGGGTCCCTGACCGATTCTCTGGCTCCAAG |
| | | TCTGGCACCTCAGCCTCCCTGGCCATCACTGGGC |
| | | TCCAGGCTGAGGATGAGGCTGATTATTACTGCCA |
| | | GTCCTATGACAGCAGCCTGCACGGTTCGGTATTC |
| | | GGCGGAGGGACCAAGCTGACCGTCCTAGGT |
| 15087 | 368 | GAGTCTGTGCTGACGCAGCCGCCCTCAGTGTCTG |
| | | GGGCCCCAGGGCAGAGGGTCACCATCTCCTGCAC |
| | | TGGGAGCAGCTCCAACATCGGGGCAGGTTATGAT |
| | | GTACACTGGTACCAGCAGCTTCCAGGAACAGCCC |
| | | CCAAACTCCTCATCTCTGGTAACAGCAATCGGCC |
| | | CTCAGGGGTCCCTGACCGATTCTCTGGCTCCAAG |
| | | TCTGGCACCTCAGCCTCCCTGGCCATCACTGGGC |
| | | TCCAGGCTGAGGATGAGGCTGATTATTACTGCCA |
| | | GTCCTATGACAGCAGCCTGCACGGTTCGGTATTC |
| | | GGCGGAGGGACCAAGCTGACCGTCCTAGGT |
| 15101 | 369 | GAGTCTGTGCTGACGCAGCCGCCCTCAGTGTCTG |
| | | GGGCCCCAGGGCAGAGGGTCACCATCTCCTGCAC |
| | | TGGGAGCAGCTCCAACATCGGGGCAGGTTATGAT |
| | | GTACACTGGTACCAGCAGCTTCCAGGAACAGCCC |
| | | CCAAACTCCTCATCTCTGGTAACAGCAATCGGCC |
| | | CTCAGGGGTCCCTGACCGATTCTCTGGCTCCAAG |
| | | TCTGGCACCTCAGCCTCCCTGGCCATCACTGGGC |
| | | TCCAGGCTGAGGATGAGGCTGATTATTACTGCCA |
| | | GTCCTATGACAGCAGCCTGAGTGGTTCGGTATTC |
| | | GGCGGAGGGACCAAGCTGACCGTCCTAGGT |
| 15103 | 370 | GAGTCTGTGCTGACGCAGCCGCCCTCAGTGTCTG |
| | | GGGCCCCAGGGCAGAGGGTCACCATCTCCTGCAC |
| | | TGGGAGCAGCTCCAACATCGGGGCAGGTTATGAT |
| | | GTACACTGGTACCAGCAGCTTCCAGGAACAGCCC |
| | | CCAAACTCCTCATCTCTGGTAACAGCAATCGGCC |
| | | CTCAGGGGTCCCTGACCGATTCTCTGGCTCCAAG |
| | | TCTGGCACCTCAGCCTCCCTGGCCATCACTGGGC |
| | | TCCAGGCTGAGGATGAGGCTGATTATTACTGCCA |
| | | GTCCTATGACAGCAGCCTGAGTGGTTCGGTATTC |
| | | GGCGGAGGGACCAAGCTGACCGTCCTAGGT |
| 15104 | 371 | GAGTCTGTGCTGACGCAGCCGCCCTCAGTGTCTG |
| | | GGGCCCCAGGGCAGAGGGTCACCATCTCCTGCAC |
| | | TGGGAGCAGCTCCAACATCGGGGCAGGTTATGAT |
| | | GTACACTGGTACCAGCAGCTTCCAGGAACAGCCC |
| | | CCAAACTCCTCATCTCTGGTAACAGCAATCGGCC |
| | | CTCAGGGGTCCCTGACCGATTCTCTGGCTCCAAG |
| | | TCTGGCACCTCAGCCTCCCTGGCCATCACTGGGC |
| | | TCCAGGCTGAGGATGAGGCTGATTATTACTGCCA |
| | | GTCCTATGACAGCAGCCTGAGTGGTTCGGTATTC |
| | | GGCGGAGGGACCAAGCTGACCGTCCTAGGT |
| 15105 | 372 | GAGTCTGTGCTGACGCAGCCGCCCTCAGTGTCTG |
| | | GGGCCCCAGGGCAGAGGGTCACCATCTCCTGCAC |
| | | TGGGAGCAGCTCCAACATCGGGGCAGGTTATGAT |
| | | GTACACTGGTACCAGCAGCTTCCAGGAACAGCCC |
| | | CCAAACTCCTCATCTCTGGTAACAGCAATCGGCC |
| | | CTCAGGGGTCCCTGACCGATTCTCTGGCTCCAAG |
| | | TCTGGCACCTCAGCCTCCCTGGCCATCACTGGGC |
| | | TCCAGGCTGAGGATGAGGCTGATTATTACTGCCA |
| | | GTCCTATGACAGCAGCCTGAGTGGTTCGGTATTC |
| | | GGCGGAGGGACCAAGCTGACCGTCCTAGGT |
| 15106 | 373 | GAGTCTGTGCTGACGCAGCCGCCCTCAGTGTCTG |
| | | GGGCCCCAGGGCAGAGGGTCACCATCTCCTGCAC |
| | | TGGGAGCAGCTCCAACATCGGGGCAGGTTATGAT |
| | | GTACACTGGTACCAGCAGCTTCCAGGAACAGCCC |
| | | CCAAACTCCTCATCTCTGGTAACAGCAATCGGCC |
| | | CTCAGGGGTCCCTGACCGATTCTCTGGCTCCAAG |
| | | TCTGGCACCTCAGCCTCCCTGGCCATCACTGGGC |
| | | TCCAGGCTGAGGATGAGGCTGATTATTACTGCCA |
| | | GTCCTATGACAGCAGCCTGAGTGGTTCGGTATTC |
| | | GGCGGAGGGACCAAGCTGACCGTCCTAGGT |
| 15108 | 374 | GAGTCTGTGCTGACGCAGCCGCCCTCAGTGTCTG |
| | | GGGCCCCAGGGCAGAGGGTCACCATCTCCTGCAC |
| | | TGGGAGCAGCTCCAACATCGGGGCAGGTTATGAT |
| | | GTACACTGGTACCAGCAGCTTCCAGGAACAGCCC |
| | | CCAAACTCCTCATCTCTGGTAACAGCAATCGGCC |
| | | CTCAGGGGTCCCTGACCGATTCTCTGGCTCCAAG |
| | | TCTGGCACCTCAGCCTCCCTGGCCATCACTGGGC |
| | | TCCAGGCTGAGGATGAGGCTGATTATTACTGCCA |
| | | GTCCTATGACAGCAGCCTGAGTGGTTCGGTATTC |
| | | GGCGGAGGGACCAAGCTGACCGTCCTAGGT |
| 15112 | 375 | GAGTCTGTGCTGACGCAGCCGCCCTCAGTGTCTG |
| | | GGGCCCCAGGGCAGAGGGTCACCATCTCCTGCAC |
| | | TGGGAGCAGCTCCAACATCGGGGCAGGTTATGAT |
| | | GTACACTGGTACCAGCAGCTTCCAGGAACAGCCC |
| | | CCAAACTCCTCATCTCTGGTAACAGCAATCGGCC |
| | | CTCAGGGGTCCCTGACCGATTCTCTGGCTCCAAG |
| | | TCTGGCACCTCAGCCTCCCTGGCCATCACTGGGC |
| | | TCCAGGCTGAGGATGAGGCTGATTATTACTGCCA |
| | | GTCCTATGACAGCAGCCTGAGTGGTTCGGTATTC |
| | | GGCGGAGGGACCAAGCTGACCGTCCTAGGT |
| 15113 | 376 | GAGTCTGTGCTGACGCAGCCGCCCTCAGTGTCTG |
| | | GGGCCCCAGGGCAGAGGGTCACCATCTCCTGCAC |
| | | TGGGAGCAGCTCCAACATCGGGGCAGGTTATGAT |
| | | GTACACTGGTACCAGCAGCTTCCAGGAACAGCCC |
| | | CCAAACTCCTCATCTCTGGTAACAGCAATCGGCC |
| | | CTCAGGGGTCCCTGACCGATTCTCTGGCTCCAAG |
| | | TCTGGCACCTCAGCCTCCCTGGCCATCACTGGGC |
| | | TCCAGGCTGAGGATGAGGCTGATTATTACTGCCA |
| | | GTCCTATGACAGCAGCCTGAGTGGTTCGGTATTC |
| | | GGCGGAGGGACCAAGCTGACCGTCCTAGGT |
| 15114 | 377 | GAGTCTGTGCTGACGCAGCCGCCCTCAGTGTCTG |
| | | GGGCCCCAGGGCAGAGGGTCACCATCTCCTGCAC |
| | | TGGGAGCAGCTCCAACATCGGGGCAGGTTATGAT |
| | | GTACACTGGTACCAGCAGCTTCCAGGAACAGCCC |
| | | CCAAACTCCTCATCTCTGGTAACAGCAATCGGCC |
| | | CTCAGGGGTCCCTGACCGATTCTCTGGCTCCAAG |
| | | TCTGGCACCTCAGCCTCCCTGGCCATCACTGGGC |
| | | TCCAGGCTGAGGATGAGGCTGATTATTACTGCCA |
| | | GTCCTATGACAGCAGCCTGAGTGGTTCGGTATTC |
| | | GGCGGAGGGACCAAGCTGACCGTCCTAGGT |
| 15117 | 378 | GAGTCTGTGCTGACGCAGCCGCCCTCAGTGTCTG |
| | | GGGCCCCAGGGCAGAGGGTCACCATCTCCTGCAC |
| | | TGGGAGCAGCTCCAACATCGGGGCAGGTTATGAT |
| | | GTACACTGGTACCAGCAGCTTCCAGGAACAGCCC |
| | | CCAAACTCCTCATCTCTGGTAACAGCAATCGGCC |
| | | CTCAGGGGTCCCTGACCGATTCTCTGGCTCCAAG |
| | | TCTGGCACCTCAGCCTCCCTGGCCATCACTGGGC |
| | | TCCAGGCTGAGGATGAGGCTGATTATTACTGCCA |
| | | GTCCTATGACAGCAGCCTGAGTGGTTCGGTATTC |
| | | GGCGGAGGGACCAAGCTGACCGTCCTAGGT |
| 15121 | 379 | GAGTCTGTGCTGACGCAGCCGCCCTCAGTGTCTG |
| | | GGGCCCCAGGGCAGAGGGTCACCATCTCCTGCAC |
| | | TGGGAGCAGCTCCAACATCGGGGCAGGTTATGAT |
| | | GTACACTGGTACCAGCAGCTTCCAGGAACAGCCC |
| | | CCAAACTCCTCATCTCTGGTAACAGCAATCGGCC |
| | | CTCAGGGGTCCCTGACCGATTCTCTGGCTCCAAG |
| | | TCTGGCACCTCAGCCTCCCTGGCCATCACTGGGC |
| | | TCCAGGCTGAGGATGAGGCTGATTATTACTGCCA |
| | | GTCCTATGACAGCAGCCTGAGTGGTTCGGTATTC |
| | | GGCGGAGGGACCAAGCTGACCGTCCTAGGT |
| 15123 | 380 | GAGTCTGTGCTGACGCAGCCGCCCTCAGTGTCTG |
| | | GGGCCCCAGGGCAGAGGGTCACCATCTCCTGCAC |
| | | TGGGAGCAGCTCCAACATCGGGGCAGGTTATGAT |
| | | GTACACTGGTACCAGCAGCTTCCAGGAACAGCCC |
| | | CCAAACTCCTCATCTCTGGTAACAGCAATCGGCC |
| | | CTCAGGGGTCCCTGACCGATTCTCTGGCTCCAAG |
| | | TCTGGCACCTCAGCCTCCCTGGCCATCACTGGGC |
| | | TCCAGGCTGAGGATGAGGCTGATTATTACTGCCA |
| | | GTCCTATGACAGCAGCCTGAGTGGTTCGGTATTC |
| | | GGCGGAGGGACCAAGCTGACCGTCCTAGGT |
| 15124 | 381 | GAGTCTGTGCTGACGCAGCCGCCCTCAGTGTCTG |
| | | GGGCCCCAGGGCAGAGGGTCACCATCTCCTGCAC |
| | | TGGGAGCAGCTCCAACATCGGGGCAGGTTATGAT |
| | | GTACACTGGTACCAGCAGCTTCCAGGAACAGCCC |
| | | CCAAACTCCTCATCTCTGGTAACAGCAATCGGCC |
| | | CTCAGGGGTCCCTGACCGATTCTCTGGCTCCAAG |
| | | TCTGGCACCTCAGCCTCCCTGGCCATCACTGGGC |
| | | TCCAGGCTGAGGATGAGGCTGATTATTACTGCCA |
| | | GTCCTATGACAGCAGCCTGAGTGGTTCGGTATTC |
| | | GGCGGAGGGACCAAGCTGACCGTCCTAGGT |
| 15126 | 382 | GAGTCTGTGCTGACGCAGCCGCCCTCAGTGTCTG |
| | | GGGCCCCAGGGCAGAGGGTCACCATCTCCTGCAC |
| | | TGGGAGCAGCTCCAACATCGGGGCAGGTTATGAT |
| | | GTACACTGGTACCAGCAGCTTCCAGGAACAGCCC |
| | | CCAAACTCCTCATCTCTGGTAACAGCAATCGGCC |
| | | CTCAGGGGTCCCTGACCGATTCTCTGGCTCCAAG |
| | | TCTGGCACCTCAGCCTCCCTGGCCATCACTGGGC |
| | | TCCAGGCTGAGGATGAGGCTGATTATTACTGCCA |
| | | GTCCTATGACAGCAGCCTGAGTGGTTCGGTATTC |
| | | GGCGGAGGGACCAAGCTGACCGTCCTAGGT |
| 15132 | 383 | GAGTCTGTGCTGACGCAGCCGCCCTCAGTGTCTG |
| | | GGGCCCCAGGGCAGAGGGTCACCATCTCCTGCAC |
| | | TGGGAGCAGCTCCAACATCGGGGCAGGTTATGAT |
| | | GTACACTGGTACCAGCAGCTTCCAGGAACAGCCC |
| | | CCAAACTCCTCATCTCTGGTAACAGCAATCGGCC |
| | | CTCAGGGGTCCCTGACCGATTCTCTGGCTCCAAG |
| | | TCTGGCACCTCAGCCTCCCTGGCCATCACTGGGC |
| | | TCCAGGCTGAGGATGAGGCTGATTATTACTGCCA |
| | | GTCCTATGACAGCAGCCTGAGTGGTTCGGTATTC |
| | | GGCGGAGGGACCAAGCTGACCGTCCTAGGT |
| 15133 | 384 | GAGTCTGTGCTGACGCAGCCGCCCTCAGTGTCTG |
| | | GGGCCCCAGGGCAGAGGGTCACCATCTCCTGCAC |
| | | TGGGAGCAGCTCCAACATCGGGGCAGGTTATGAT |
| | | GTACACTGGTACCAGCAGCTTCCAGGAACAGCCC |
| | | CCAAACTCCTCATCTCTGGTAACAGCAATCGGCC |
| | | CTCAGGGGTCCCTGACCGATTCTCTGGCTCCAAG |
| | | TCTGGCACCTCAGCCTCCCTGGCCATCACTGGGC |
| | | TCCAGGCTGAGGATGAGGCTGATTATTACTGCCA |
| | | GTCCTATGACAGCAGCCTGAGTGGTTCGGTATTC |
| | | GGCGGAGGGACCAAGCTGACCGTCCTAGGT |
| 15136 | 385 | GAGTCTGTGCTGACGCAGCCGCCCTCAGTGTCTG |
| | | GGGCCCCAGGGCAGAGGGTCACCATCTCCTGCAC |
| | | TGGGAGCAGCTCCAACATCGGGGCAGGTTATGAT |
| | | GTACACTGGTACCAGCAGCTTCCAGGAACAGCCC |
| | | CCAAACTCCTCATCTCTGGTAACAGCAATCGGCC |
| | | CTCAGGGGTCCCTGACCGATTCTCTGGCTCCAAG |
| | | TCTGGCACCTCAGCCTCCCTGGCCATCACTGGGC |
| | | TCCAGGCTGAGGATGAGGCTGATTATTACTGCCA |
| | | GTCCTATGACAGCAGCCTGAGTGGTTCGGTATTC |
| | | GGCGGAGGGACCAAGCTGACCGTCCTAGGT |
| 15139 | 386 | GAGTCTGTGCTGACGCAGCCGCCCTCAGTGTCTG |
| | | GGGCCCCAGGGCAGAGGGTCACCATCTCCTGCAC |
| | | TGGGAGCAGCTCCAACATCGGGGCAGGTTATGAT |
| | | GTACACTGGTACCAGCAGCTTCCAGGAACAGCCC |
| | | CCAAACTCCTCATCTCTGGTAACAGCAATCGGCC |
| | | CTCAGGGGTCCCTGACCGATTCTCTGGCTCCAAG |
| | | TCTGGCACCTCAGCCTCCCTGGCCATCACTGGGC |
| | | TCCAGGCTGAGGATGAGGCTGATTATTACTGCCA |
| | | GTCCTATGACAGCAGCCTGAGTGGTTCGGTATTC |
| | | GGCGGAGGGACCAAGCTGACCGTCCTAGGT |
| 15140 | 387 | GAGTCTGTGCTGACGCAGCCGCCCTCAGTGTCTG |
| | | GGGCCCCAGGGCAGAGGGTCACCATCTCCTGCAC |
| | | TGGGAGCAGCTCCAACATCGGGGCAGGTTATGAT |
| | | GTACACTGGTACCAGCAGCTTCCAGGAACAGCCC |
| | | CCAAACTCCTCATCTCTGGTAACAGCAATCGGCC |
| | | CTCAGGGGTCCCTGACCGATTCTCTGGCTCCAAG |
| | | TCTGGCACCTCAGCCTCCCTGGCCATCACTGGGC |
| | | TCCAGGCTGAGGATGAGGCTGATTATTACTGCCA |
| | | GTCCTATGACAGCAGCCTGAGTGGTTCGGTATTC |
| | | GGCGGAGGGACCAAGCTGACCGTCCTAGGT |
| 15141 | 388 | GAGTCTGTGCTGACGCAGCCGCCCTCAGTGTCTG |
| | | GGGCCCCAGGGCAGAGGGTCACCATCTCCTGCAC |
| | | TGGGAGCAGCTCCAACATCGGGGCAGGTTATGAT |
| | | GTACACTGGTACCAGCAGCTTCCAGGAACAGCCC |
| | | CCAAACTCCTCATCTCTGGTAACAGCAATCGGCC |
| | | CTCAGGGGTCCCTGACCGATTCTCTGGCTCCAAG |
| | | TCTGGCACCTCAGCCTCCCTGGCCATCACTGGGC |
| | | TCCAGGCTGAGGATGAGGCTGATTATTACTGCCA |
| | | GTCCTATGACAGCAGCCTGAGTGGTTCGGTATTC |
| | | GGCGGAGGGACCAAGCTGACCGTCCTAGGT |
| SS-13983 | 389 | GATATTGTGATGACTCAGTCTCCACTCTCCCTGCC |
| A01 | | CGTCACCCCTGGAGAGCCGGCCTCCATCTCCTGC |
| | | AGGTCTAGTCAGAGCCTCCTGCATAGTAATGGAC |
| | | ACAACTATTTGGATTGGTACCTGCAGAAGCCAGG |
| | | GCAGTCTCCACAGCTCCTGATCTATTTGGGTCTCA |
| | | ATCGGGCCTCCGGGGTCCCTGACAGGTTCAGTGG |
| | | CAGTGGATCAGGCACAGATTTTACACTGAAAATC |
| | | AGCAGAGTGGAGGCTGAGGATGTTGGGGTTTATT |
| | | ACTGCATGCAAGCTCTACAAACTCCGCTCACTTT |
| | | CGGCGGAGGGACCAAGGTAGAGATCAAACGG |
| SS-13991 | 390 | GATATTGTGATGACTCAGTCTCCACTCTCCCTGCC |
| A02 | | CGTCACCCCTGGAGAGCCGGCCTCCATCTCCTGC |
| | | AGGTCTAGTCAGAGCCTCCTGCATAGTAATGGAC |
| | | ACAACTATTTGGATTGGTACCTGCAGAAGCCAGG |
| | | GCAGTCTCCACAGCTCCTGATCTATTTGGGTCTCA |
| | | ATCGGGCCCACGGGGTCCCTGACAGGTTCAGTGG |
| | | CAGTGGATCAGGCACAGATTTTACACTGAAAATC |
| | | AGCAGAGTGGAGGCTGAGGATGTTGGGGTTTATT |
| | | ACTGCATGCAAGCTCTACAAACTCCGCTCACTTT |
| | | CGGCGGAGGGACCAAGGTAGAGATCAAACGG |
| SS-13993 | 391 | GATATTGTGATGACTCAGTCTCCACTCTCCCTGCC |
| C02 | | CGTCACCCCTGGAGAGCCGGCCTCCATCTCCTGC |
| | | AGGTCTAGTCAGAGCCTCCTGCATAGTAATGGAC |
| | | ACAACTATTTGGATTGGTACCTGCAGAAGCCAGG |
| | | GCAGTCTCCACAGCTCCTGATCTATTTGGGTCTCA |
| | | ATCGGGCCTCCGGGGTCCCTGACAGGTTCAGTGG |
| | | CAGTGGACACGGCACAGATTTTACACTGAAAATC |
| | | AGCAGAGTGGAGGCTGAGGATGTTGGGGTTTATT |
| | | ACTGCATGCAAGCTCTACAAACTCCGCTCACTTT |
| | | CGGCGGAGGGACCAAGGTAGAGATCAAACGG |
| SS-12685 | 392 | GATATTGTGATGACTCAGTCTCCACTCTCCCTGCC |
| P1B1 | | CGTCACCCCTGGAGAGCCGGCCTCCATCTCCTGC |
| | | AGGTCTAGTCAGAGCCTCCTGCATAGTTACGGAT |
| | | ACAACTATTTGGATTGGTACCTGCAGAAGCCAGG |
| | | GCAGTCTCCACAGCTCCTGATCTATTTGGGTTCTA |
| | | ATCGGGCCTCCGGGGTCCCTGACAGGTTCAGTGG |
| | | CAGTGGATCAGGCACAGATTTTACACTGAAAATC |
| | | AGCAGAGTGGAGGCTGAGGATGTTGGGGTTTATT |
| | | ACTGCATGCAAGCTCTACAAACTCCGCTCACTTT |
| | | CGGCGGAGGGACCAAGGTAGAGATCAAACGG |
| SS-12686 | 393 | GATATTGTGATGACTCAGTCTCCACTCTCCCTGCC |
| P2F5 | | CGTCACCCCTGGAGAGCCGGCCTCCATCTCCTGC |
| | | AGGTCTAGTCAGAGCCTCCTGCATAGTTTCGGAT |
| | | ACAACTATTTGGATTGGTACCTGCAGAAGCCAGG |
| | | GCAGTCTCCACAGCTCCTGATCTATTTGGGTTCTA |
| | | ATCGGGCCTCCGGGGTCCCTGACAGGTTCAGTGG |
| | | CAGTGGATCAGGCACAGATTTTACACTGAAAATC |
| | | AGCAGAGTGGAGGCTGAGGATGTTGGGGTTTATT |
| | | ACTGCATGCAAGCTCTACAAACTCCGCTCACTTT |
| | | CGGCGGAGGGACCAAGGTAGAGATCAAACGG |
| SS-12687 | 394 | GATATTGTGATGACTCAGTCTCCACTCTCCCTGCC |
| P2C6 | | CGTCACCCCTGGAGAGCCGGCCTCCATCTCCTGC |
| | | AGGTCTAGTCAGAGCCTCCTGCATAGTAATGGAT |
| | | ACAACTATTTGGATTGGTACCTGCAGAAGCCAGG |
| | | GCAGTCTCCACAGCTCCTGATCTATTTGGGTCTCA |
| | | ATCGGGCCTCCGGGGTCCCTGACAGGTTCAGTGG |
| | | CAGTGGATCAGGCACAGATTTTACACTGAAAATC |
| | | AGCAGAGTGGAGGCTGAGGATGTTGGGGTTTATT |
| | | ACTGCATGCAAGCTCTACAAACTCCGCTCACTTT |
| | | CGGCGGAGGGACCAAGGTAGAGATCAAACGG |
| SS-114982 | 395 | GATATTGTGATGACTCAGTCTCCACTCTCCCTGCC |
| P2F5/P2C6 | | CGTCACCCCTGGAGAGCCGGCCTCCATCTCCTGC |
| | | AGGTCTAGTCAGAGCCTCCTGCATAGTTTCGGAT |
| | | ACAACTATTTGGATTGGTACCTGCAGAAGCCAGG |
| | | GCAGTCTCCACAGCTCCTGATCTATTTGGGTCTCA |
| | | ATCGGGCCTCCGGGGTCCCTGACAGGTTCAGTGG |
| | | CAGTGGATCAGGCACAGATTTTACACTGAAAATC |
| | | AGCAGAGTGGAGGCTGAGGATGTTGGGGTTTATT |
| | | ACTGCATGCAAGCTCTACAAACTCCGCTCACTTT |
| | | CGGCGGAGGGACCAAGGTAGAGATCAAACGG |
| SS-15509 | 396 | GATATTGTGATGACTCAGTCTCCACTCTCCCTGCC |
| | | CGTCACCCCTGGAGAGCCGGCCTCCATCTCCTGC |
| | | AGGTCTAGTCAGAGCCTCCTGCATAGTTTCGGAT |
| | | ACAACTATTTGGATTGGTACCTGCAGAAGCCAGG |
| | | GCAGTCTCCACAGCTCCTGATCTATTTGGGTATG |
| | | AATCGGGCCTCCGGGGTCCCTGACAGGTTCAGTG |
| | | GCAGTGGATCAGGCACAGATTTTACACTGAAAAT |
| | | CAGCAGAGTGGAGGCTGAGGATGTTGGGGTTTAT |
| | | TACTGCATGCAAGCTCTACAAACTCCGCTCACTT |
| | | TCGGCGGAGGGACCAAGGTAGAGATCAAACGG |
| SS-15510 | 397 | GATATTGTGATGACTCAGTCTCCACTCTCCCTGCC |
| | | CGTCACCCCTGGAGAGCCGGCCTCCATCTCCTGC |
| | | AGGTCTAGTCAGAGCCTCCTGCATAGTTTCGGAT |
| | | ACAACTATTTGGATTGGTACCTGCAGAAGCCAGG |
| | | GCAGTCTCCACAGCTCCTGATCTATTTGGGTTTTA |
| | | ATCGGGCCTCCGGGGTCCCTGACAGGTTCAGTGG |
| | | CAGTGGATCAGGCACAGATTTTACACTGAAAATC |
| | | AGCAGAGTGGAGGCTGAGGATGTTGGGGTTTATT |
| | | ACTGCATGCAAGCTCTACAAACTCCGCTCACTTT |
| | | CGGCGGAGGGACCAAGGTAGAGATCAAACGG |
| SS-15511 | 398 | GATATTGTGATGACTCAGTCTCCACTCTCCCTGCC |
| | | CGTCACCCCTGGAGAGCCGGCCTCCATCTCCTGC |
| | | AGGTCTAGTCAGAGCCTCCTGCATAGTTTCGGAT |
| | | ACAACTATTTGGATTGGTACCTGCAGAAGCCAGG |
| | | GCAGTCTCCACAGCTCCTGATCTATTTGGGTCAT |
| | | AATCGGGCCTCCGGGGTCCCTGACAGGTTCAGTG |
| | | GCAGTGGATCAGGCACAGATTTTACACTGAAAAT |
| | | CAGCAGAGTGGAGGCTGAGGATGTTGGGGTTTAT |
| | | TACTGCATGCAAGCTCTACAAACTCCGCTCACTT |
| | | TCGGCGGAGGGACCAAGGTAGAGATCAAACGG |
| SS-15512 | 399 | GATATTGTGATGACTCAGTCTCCACTCTCCCTGCC |
| | | CGTCACCCCTGGAGAGCCGGCCTCCATCTCCTGC |
| | | AGGTCTAGTCAGAGCCTCCTGCATAGTTTCGGAT |
| | | ACAACTATTTGGATTGGTACCTGCAGAAGCCAGG |
| | | GCAGTCTCCACAGCTCCTGATCTATTTGGGTAAT |
| | | AATCGGGCCTCCGGGGTCCCTGACAGGTTCAGTG |
| | | GCAGTGGATCAGGCACAGATTTTACACTGAAAAT |
| | | CAGCAGAGTGGAGGCTGAGGATGTTGGGGTTTAT |
| | | TACTGCATGCAAGCTCTACAAACTCCGCTCACTT |
| | | TCGGCGGAGGGACCAAGGTAGAGATCAAACGG |
| SS-15513 | 400 | GATATTGTGATGACTCAGTCTCCACTCTCCCTGCC |
| | | CGTCACCCCTGGAGAGCCGGCCTCCATCTCCTGC |
| | | AGGTCTAGTCAGAGCCTCCTGCATAGTTTCGGAT |
| | | ACAACTATTTGGATTGGTACCTGCAGAAGCCAGG |
| | | GCAGTCTCCACAGCTCCTGATCTATTTGGGTTGG |
| | | AATCGGGCCTCCGGGGTCCCTGACAGGTTCAGTG |
| | | GCAGTGGATCAGGCACAGATTTTACACTGAAAAT |
| | | CAGCAGAGTGGAGGCTGAGGATGTTGGGGTTTAT |
| | | TACTGCATGCAAGCTCTACAAACTCCGCTCACTT |
| | | TCGGCGGAGGGACCAAGGTAGAGATCAAACGG |
| SS-15514 | 401 | GATATTGTGATGACTCAGTCTCCACTCTCCCTGCC |
| | | CGTCACCCCTGGAGAGCCGGCCTCCATCTCCTGC |
| | | AGGTCTAGTCAGAGCCTCCTGCATAGTTTCGGAT |
| | | ACAACTATTTGGATTGGTACCTGCAGAAGCCAGG |
| | | GCAGTCTCCACAGCTCCTGATCTATTTGGGTCAA |
| | | AATCGGGCCTCCGGGGTCCCTGACAGGTTCAGTG |
| | | GCAGTGGATCAGGCACAGATTTTACACTGAAAAT |
| | | CAGCAGAGTGGAGGCTGAGGATGTTGGGGTTTAT |
| | | TACTGCATGCAAGCTCTACAAACTCCGCTCACTT |
| | | TCGGCGGAGGGACCAAGGTAGAGATCAAACGG |
| SS-15497 | 402 | GATATTGTGATGACTCAGTCTCCACTCTCCCTGCC |
| | | CGTCACCCCTGGAGAGCCGGCCTCCATCTCCTGC |
| | | AGGTCTAGTCAGAGCCTCCTGCATAGTGGTAATG |
| | | GATACAACTATTTGGATTGGTACCTGCAGAAGCC |
| | | AGGGCAGTCTCCACAGCTCCTGATCTATTTGGGT |
| | | CTCAATCGGGCCTCCGGGGTCCCTGACAGGTTCA |
| | | GTGGCAGTGGATCAGGCACAGATTTTACACTGAA |
| | | AATCAGCAGAGTGGAGGCTGAGGATGTTGGGGT |
| | | TTATTACTGCATGCAAGCTATCCATACTCCGCTCA |
| | | CTTTCGGCGGAGGGACCAAGGTAGAGATCAAAC |
| | | GG |
| SS-15515 | 403 | GATATTGTGATGACTCAGTCTCCACTCTCCCTGCC |
| | | CGTCACCCCTGGAGAGCCGGCCTCCATCTCCTGC |
| | | AGGTCTAGTCAGTCGCTCCTGCATAGTGGGAATG |
| | | GATACAACTATTTGGATTGGTACCTGCAGAAGCC |
| | | AGGGCAGTCTCCACAGCTCCTGATCTATTTGGGT |
| | | ATGAATCGGGCCTCCGGGGTCCCTGACAGGTTCA |
| | | GTGGCAGTGGATCAGGCACAGATTTTACACTGAA |
| | | AATCAGCAGAGTGGAGGCTGAGGATGTTGGGGT |
| | | TTATTACTGCATGCAAGCTATCCACACTCCGCTC |
| | | ACTTTCGGCGGAGGGACCAAGGTAGAGATCAAA |
| | | CGG |
| SS-15516 | 404 | GATATTGTGATGACTCAGTCTCCACTCTCCCTGCC |
| | | CGTCACCCCTGGAGAGCCGGCCTCCATCTCCTGC |
| | | AGGTCTAGTCAGTCGCTCCTGCATAGTGGGAATG |
| | | GATACAACTATTTGGATTGGTACCTGCAGAAGCC |
| | | AGGGCAGTCTCCACAGCTCCTGATCTATTTGGGT |
| | | TTTAATCGGGCCTCCGGGGTCCCTGACAGGTTCA |
| | | GTGGCAGTGGATCAGGCACAGATTTTACACTGAA |
| | | AATCAGCAGAGTGGAGGCTGAGGATGTTGGGGT |
| | | TTATTACTGCATGCAAGCTATCCACACTCCGCTC |
| | | ACTTTCGGCGGAGGGACCAAGGTAGAGATCAAA |
| | | CGG |
| SS-15517 | 405 | GATATTGTGATGACTCAGTCTCCACTCTCCCTGCC |
| | | CGTCACCCCTGGAGAGCCGGCCTCCATCTCCTGC |
| | | AGGTCTAGTCAGTCGCTCCTGCATAGTGGGAATG |
| | | GATACAACTATTTGGATTGGTACCTGCAGAAGCC |
| | | AGGGCAGTCTCCACAGCTCCTGATCTATTTGGGT |
| | | CATAATCGGGCCTCCGGGGTCCCTGACAGGTTCA |
| | | GTGGCAGTGGATCAGGCACAGATTTTACACTGAA |
| | | AATCAGCAGAGTGGAGGCTGAGGATGTTGGGGT |
| | | TTATTACTGCATGCAAGCTATCCACACTCCGCTC |
| | | ACTTTCGGCGGAGGGACCAAGGTAGAGATCAAA |
| | | CGG |
| SS-15518 | 406 | GATATTGTGATGACTCAGTCTCCACTCTCCCTGCC |
| | | CGTCACCCCTGGAGAGCCGGCCTCCATCTCCTGC |
| | | AGGTCTAGTCAGTCGCTCCTGCATAGTGGGAATG |
| | | GATACAACTATTTGGATTGGTACCTGCAGAAGCC |
| | | AGGGCAGTCTCCACAGCTCCTGATCTATTTGGGT |
| | | AATAATCGGGCCTCCGGGGTCCCTGACAGGTTCA |
| | | GTGGCAGTGGATCAGGCACAGATTTTACACTGAA |
| | | AATCAGCAGAGTGGAGGCTGAGGATGTTGGGGT |
| | | TTATTACTGCATGCAAGCTATCCACACTCCGCTC |
| | | ACTTTCGGCGGAGGGACCAAGGTAGAGATCAAA |
| | | CGG |
| SS-15519 | 407 | GATATTGTGATGACTCAGTCTCCACTCTCCCTGCC |
| | | CGTCACCCCTGGAGAGCCGGCCTCCATCTCCTGC |
| | | AGGTCTAGTCAGTCGCTCCTGCATAGTGGGAATG |
| | | GATACAACTATTTGGATTGGTACCTGCAGAAGCC |
| | | AGGGCAGTCTCCACAGCTCCTGATCTATTTGGGT |
| | | TGGAATCGGGCCTCCGGGGTCCCTGACAGGTTCA |
| | | GTGGCAGTGGATCAGGCACAGATTTTACACTGAA |
| | | AATCAGCAGAGTGGAGGCTGAGGATGTTGGGGT |
| | | TTATTACTGCATGCAAGCTATCCACACTCCGCTC |
| | | ACTTTCGGCGGAGGGACCAAGGTAGAGATCAAA |
| | | CGG |
| SS-15520 | 408 | GATATTGTGATGACTCAGTCTCCACTCTCCCTGCC |
| | | CGTCACCCCTGGAGAGCCGGCCTCCATCTCCTGC |
| | | AGGTCTAGTCAGTCGCTCCTGCATAGTGGGAATG |
| | | GATACAACTATTTGGATTGGTACCTGCAGAAGCC |
| | | AGGGCAGTCTCCACAGCTCCTGATCTATTTGGGT |
| | | CAAAATCGGGCCTCCGGGGTCCCTGACAGGTTCA |
| | | GTGGCAGTGGATCAGGCACAGATTTTACACTGAA |
| | | AATCAGCAGAGTGGAGGCTGAGGATGTTGGGGT |
| | | TTATTACTGCATGCAAGCTATCCACACTCCGCTC |
| | | ACTTTCGGCGGAGGGACCAAGGTAGAGATCAAA |
| | | CGG |
| SS-15522 | 409 | GATATTGTGATGACTCAGTCTCCACTCTCCCTGCC |
| | | CGTCACCCCTGGAGAGCCGGCCTCCATCTCCTGC |
| | | AGGTCTAGTCAGAGCCTCCTGCATAGTAATGGAT |
| | | ACAACTATTTGGATTGGTACCTGCAGAAGCCAGG |
| | | GCAGTCTCCACAGCTCCTGATCTATTTGGGTCTCG |
| | | CACGGGCCTCCGGGGTCCCTGACAGGTTCAGTGG |
| | | CAGTGGATCAGGCACAGATTTTACACTGAAAATC |
| | | AGCAGAGTGGAGGCTGAGGATGTTGGGGTTTATT |
| | | ACTGCATGCAAGCTCTACAAACTCCGCTCACTTT |
| | | CGGCGGAGGGACCAAGGTAGAGATCAAACGG |
| SS-15524 | 410 | GATATTGTGATGACTCAGTCTCCACTCTCCCTGCC |
| | | CGTCACCCCTGGAGAGCCGGCCTCCATCTCCTGC |
| | | AGGTCTAGTCAGAGCCTCCTGCATAGTAATGGAT |
| | | ACAACTATTTGGATTGGTACCTGCAGAAGCCAGG |
| | | GCAGTCTCCACAGCTCCTGATCTATTTGGGTCTCG |
| | | CACGGGCCTCCGGGGTCCCTGACAGGTTCAGTGG |
| | | CAGTGGATCAGGCACAGATTTTACACTGAAAATC |
| | | AGCAGAGTGGAGGCTGAGGATGTTGGGGTTTATT |
| | | ACTGCATGCAAGCTCTACAAACTCCGCTCACTTT |
| | | CGGCGGAGGGACCAAGGTAGAGATCAAACGG |
| SS-14835 | 411 | GATATTGTGATGACTCAGTCTCCACTCTCCCTGCC |
| | | CGTCACCCCTGGAGAGCCGGCCTCCATCTCCTGC |
| | | AGGTCTAGTCAGAGCCTCCTGCATAGTGGTAATG |
| | | GATACAACTATTTGGATTGGTACCTGCAGAAGCC |
| | | AGGGCAGTCTCCACAGCTCCTGATCTATTTGGGT |
| | | CTCAATCGGGCCTCCGGGGTCCCTGACAGGTTCA |
| | | GTGGCAGTGGATCAGGCACAGATTTTACACTGAA |
| | | AATCAGCAGAGTGGAGGCTGAGGATGTTGGGGT |
| | | TTATTACTGCATGCAAGCTATCCATACTCCGCTCA |
| | | CTTTCGGCGGAGGGACCAAGGTAGAGATCAAAC |
| | | GG |
| SS-15194 | 412 | GATATTGTGATGACTCAGTCTCCACTCTCCCTGCC |
| | | CGTCACCCCTGGAGAGCCGGCCTCCATCTCCTGC |
| | | AGGTCTAGTCAGAGCCTCCTGCATAGTAATGGAC |
| | | ACAACTATTTGGATTGGTACCTGCAGAAGCCAGG |
| | | GCAGTCTCCACAGCTCCTGATCTATTTGGGTCTCA |
| | | ATCGGGCCTCCGGGGTCCCTGACAGGTTCAGTGG |
| | | CAGTGGATCAGGCACAGATTTTACACTGAAAATC |
| | | AGCAGAGTGGAGGCTGAGGATGTTGGGGTTTATT |
| | | ACTGCATGCAAGCTCTACAAACTCCGCTCACTTT |
| | | CGGCGGAGGGACCAAGGTAGAGATCAAACGG |
| SS-15195 | 413 | GATATTGTGATGACTCAGTCTCCACTCTCCCTGCC |
| | | CGTCACCCCTGGAGAGCCGGCCTCCATCTCCTGC |
| | | AGGTCTAGTCAGAGCCTCCTGCATAGTAATGGAC |
| | | ACAACTATTTGGATTGGTACCTGCAGAAGCCAGG |
| | | GCAGTCTCCACAGCTCCTGATCTATTTGGGTCTCA |
| | | ATCGGGCCCACGGGGTCCCTGACAGGTTCAGTGG |
| | | CAGTGGATCAGGCACAGATTTTACACTGAAAATC |
| | | AGCAGAGTGGAGGCTGAGGATGTTGGGGTTTATT |
| | | ACTGCATGCAAGCTCTACAAACTCCGCTCACTTT |
| | | CGGCGGAGGGACCAAGGTAGAGATCAAACGG |
| SS-15196 | 414 | GATATTGTGATGACTCAGTCTCCACTCTCCCTGCC |
| | | CGTCACCCCTGGAGAGCCGGCCTCCATCTCCTGC |
| | | AGGTCTAGTCAGAGCCTCCTGCATAGTGGTAATG |
| | | GATACAACTATTTGGATTGGTACCTGCAGAAGCC |
| | | AGGGCAGTCTCCACAGCTCCTGATCTATTTGGGT |
| | | CTCAATCGGGCCTCCGGGGTCCCTGACAGGTTCA |
| | | GTGGCAGTGGATCAGGCACAGATTTTACACTGAA |
| | | AATCAGCAGAGTGGAGGCTGAGGATGTTGGGGT |
| | | TTATTACTGCATGCAAGCTATCCATACTCCGCTCA |
| | | CTTTCGGCGGAGGGACCAAGGTAGAGATCAAAC |
| | | GG |
| SS-14894 | 415 | GATATTGTGATGACTCAGTCTCCACTCTCCCTGCC |
| | | CGTCACCCCTGGAGAGCCGGCCTCCATCTCCTGC |
| | | AGGTCTAGTCAGAGCCTCCTGCATAGTGGTAATG |
| | | GATACAACTATTTGGATTGGTACCTGCAGAAGCC |
| | | AGGGCAGTCTCCACAGCTCCTGATCTATTTGGGT |
| | | CTCAATCGGGCCTCCGGGGTCCCTGACAGGTTCA |
| | | GTGGCAGTGGATCAGGCACAGATTTTACACTGAA |
| | | AATCAGCAGAGTGGAGGCTGAGGATGTTGGGGT |
| | | TTATTACTGCATGCAAGCTCTACAAACTCCGCTC |
| | | ACTTTCGGCGGAGGGACCAAGGTAGAGATCAAA |
| | | CGG |
| SS-15504 | 416 | GATATTGTGATGACTCAGTCTCCACTCTCCCTGCC |
| | | CGTCACCCCTGGAGAGCCGGCCTCCATCTCCTGC |
| | | AGGTCTAGTCAGAGCCTCCTGCATAGTAATGGAC |
| | | ACAACTATTTGGATTGGTACCTGCAGAAGCCAGG |
| | | GCAGTCTCCACAGCTCCTGATCTATTTGGGTCTCA |
| | | ATCGGGCCCACGGGGTCCCTGACAGGTTCAGTGG |
| | | CAGTGGATCAGGCACAGATTTTACACTGAAAATC |
| | | AGCAGAGTGGAGGCTGAGGATGTTGGGGTTTATT |
| | | ACTGCATGCAAGCTCTACAAACTCCGCTCACTTT |
| | | CGGCGGAGGGACCAAGGTAGAGATCAAACGG |
| SS-15494 | 417 | GATATTGTGATGACTCAGTCTCCACTCTCCCTGCC |
| | | CGTCACCCCTGGAGAGCCGGCCTCCATCTCCTGC |
| | | AGGTCTAGTCAGAGCCTCCTGCATAGTTTCGGAT |
| | | ACAACTATTTGGATTGGTACCTGCAGAAGCCAGG |
| | | GCAGTCTCCACAGCTCCTGATCTATTTGGGTCTCA |
| | | ATCGGGCCTCCGGGGTCCCTGACAGGTTCAGTGG |
| | | CAGTGGATCAGGCACAGATTTTACACTGAAAATC |
| | | AGCAGAGTGGAGGCTGAGGATGTTGGGGTTTATT |
| | | ACTGCATGCAAGCTCTACAAACTCCGCTCACTTT |
| | | CGGCGGAGGGACCAAGGTAGAGATCAAACGG |
| SS-14892 | 418 | GATATTGTGATGACTCAGTCTCCACTCTCCCTGCC |
| | | CGTCACCCCTGGAGAGCCGGCCTCCATCTCCTGC |
| | | AGGTCTAGTCAGAGCCTCCTGCATAGTTTCGGAT |
| | | ACAACTATTTGGATTGGTACCTGCAGAAGCCAGG |
| | | GCAGTCTCCACAGCTCCTGATCTATTTGGGTCTCA |
| | | ATCGGGCCTCCGGGGTCCCTGACAGGTTCAGTGG |
| | | CAGTGGATCAGGCACAGATTTTACACTGAAAATC |
| | | AGCAGAGTGGAGGCTGAGGATGTTGGGGTTTATT |
| | | ACTGCATGCAAGCTCTACAAACTCCGCTCACTTT |
| | | CGGCGGAGGGACCAAGGTAGAGATCAAACGG |
| SS-15495 | 419 | GATATTGTGATGACTCAGTCTCCACTCTCCCTGCC |
| | | CGTCACCCCTGGAGAGCCGGCCTCCATCTCCTGC |
| | | AGGTCTAGTCAGAGCCTCCTGCATAGTTTTGGAC |
| | | ACAACTATTTGGATTGGTACCTGCAGAAGCCAGG |
| | | GCAGTCTCCACAGCTCCTGATCTATTTGGGTCTCA |
| | | ATCGGGCCCACGGGGTCCCTGACAGGTTCAGTGG |
| | | CAGTGGATCAGGCACAGATTTTACACTGAAAATC |
| | | AGCAGAGTGGAGGCTGAGGATGTTGGGGTTTATT |
| | | ACTGCATGCAAGCTCTACAAACTCCGCTCACTTT |
| | | CGGCGGAGGGACCAAGGTAGAGATCAAACGG |
| SS-15496 | 420 | GATATTGTGATGACTCAGTCTCCACTCTCCCTGCC |
| | | CGTCACCCCTGGAGAGCCGGCCTCCATCTCCTGC |
| | | AGGTCTAGTCAGAGCCTCCTGCATAGTTTTGGAC |
| | | ACAACTATTTGGATTGGTACCTGCAGAAGCCAGG |
| | | GCAGTCTCCACAGCTCCTGATCTATTTGGGTCTCA |
| | | ATCGGGCCCACGGGGTCCCTGACAGGTTCAGTGG |
| | | CAGTGGATCAGGCACAGATTTTACACTGAAAATC |
| | | AGCAGAGTGGAGGCTGAGGATGTTGGGGTTTATT |
| | | ACTGCATGCAAGCTCTACAAACTCCGCTCACTTT |
| | | CGGCGGAGGGACCAAGGTAGAGATCAAACGG |
| SS-15497 | 421 | GATATTGTGATGACTCAGTCTCCACTCTCCCTGCC |
| | | CGTCACCCCTGGAGAGCCGGCCTCCATCTCCTGC |
| | | AGGTCTAGTCAGAGCCTCCTGCATAGTGGTAATG |
| | | GATACAACTATTTGGATTGGTACCTGCAGAAGCC |
| | | AGGGCAGTCTCCACAGCTCCTGATCTATTTGGGT |
| | | CTCAATCGGGCCTCCGGGGTCCCTGACAGGTTCA |
| | | GTGGCAGTGGATCAGGCACAGATTTTACACTGAA |
| | | AATCAGCAGAGTGGAGGCTGAGGATGTTGGGGT |
| | | TTATTACTGCATGCAAGCTATCCATACTCCGCTCA |
| | | CTTTCGGCGGAGGGACCAAGGTAGAGATCAAAC |
| | | GG |
| SS-15503 | 422 | ATGGACATGAGGGTGCCCGCTCAGCTCCTGGGGC |
| | | TCCTGCTGCTGTGGCTGAGAGGTGCCAGATGTGA |
| | | TATTGTGATGACTCAGTCTCCACTCTCCCTGCCCG |
| | | TCACCCCTGGAGAGCCGGCCTCCATCTCCTGCAG |
| | | GTCTAGTCAGAGCCTCCTGCATAGTAATGGACAC |
| | | AACTATTTGGATTGGTACCTGCAGAAGCCAGGGC |
| | | AGTCTCCACAGCTCCTGATCTATTTGGGTCTCAAT |
| | | CGGGCCCACGGGGTCCCTGACAGGTTCAGTGGCA |
| | | GTGGATCAGGCACAGATTTTACACTGAAAATCAG |
| | | CAGAGTGGAGGCTGAGGATGTTGGGGTTTATTAC |
| | | TGCATGCAAGCTCTACAAACTCCGCTCACTTTCGG |
| | | GCGGAGGGACCAAGGTAGAGATCAAACGGACTG |
| | | TGGCTGCACCATCTGTCTTCATCTTCCCGCCATCT |
| | | GATGAGCAGTTGAAATCTGGAACTGCCTCTGTTG |
| | | TGTGCCTGCTGAATAACTTCTATCCCAGAGAGGC |
| | | CAAAGTACAGTGGAAGGTGGATAACGCCCTCCA |
| | | ATCGGGTAACTCCCAGGAGAGTGTCACAGAGCA |
| | | GGACAGCAAGGACAGCACCTACAGCCTCAGCAG |
| | | CACCCTGACGCTGAGCAAAGCAGACTACGAGAA |
| | | ACACAAAGTCTACGCCTGCGAAGTCACCCATCAG |
| | | GGCCTGAGCTCGCCCGTCACAAAGAGCTTCAACA |
| | | GGGGAGAGTGT |
| SS-15505 | 423 | ATGGACATGAGGGTGCCCGCTCAGCTCCTGGGGC |
| | | TCCTGCTGCTGTGGCTGAGAGGTGCCAGATGTGA |
| | | TATTGTGATGACTCAGTCTCCACTCTCCCTGCCCG |
| | | TCACCCCTGGAGAGCCGGCCTCCATCTCCTGCAG |
| | | GTCTAGTCAGAGCCTCCTGCATAGTTTCGGATAC |
| | | AACTATTTGGATTGGTACCTGCAGAAGCCAGGGC |
| | | AGTCTCCACAGCTCCTGATCTATTTGGGTCTCAAT |
| | | CGGGCCTCCGGGGTCCCTGACAGGTTCAGTGGCA |
| | | GTGGATCAGGCACAGATTTTACACTGAAAATCAG |
| | | CAGAGTGGAGGCTGAGGATGTTGGGGTTTATTAC |
| | | TGCATGCAAGCTCTACAAACTCCGCTCACTTTCG |
| | | GCGGAGGGACCAAGGTAGAGATCAAACGGACTG |
| | | TGGCTGCACCATCTGTCTTCATCTTCCCGCCATCT |
| | | GATGAGCAGTTGAAATCTGGAACTGCCTCTGTTG |
| | | TGTGCCTGCTGAATAACTTCTATCCCAGAGAGGC |
| | | CAAAGTACAGTGGAAGGTGGATAACGCCCTCCA |
| | | ATCGGGTAACTCCCAGGAGAGTGTCACAGAGCA |
| | | GGACAGCAAGGACAGCACCTACAGCCTCAGCAG |
| | | CACCCTGACGCTGAGCAAAGCAGACTACGAGAA |
| | | ACACAAAGTCTACGCCTGCGAAGTCACCCATCAG |
| | | GGCCTGAGCTCGCCCGTCACAAAGAGCTTCAACA |
| | | GGGGAGAGTGT |
| SS-15506 | 424 | GATATTGTGATGACTCAGTCTCCACTCTCCCTGCC |
| | | CGTCACCCCTGGAGAGCCGGCCTCCATCTCCTGC |
| | | AGGTCTAGTCAGAGCCTCCTGCATAGTAATGGAC |
| | | ACAACTATTTGGATTGGTACCTGCAGAAGCCAGG |
| | | GCAGTCTCCACAGCTCCTGATCTATTTGGGTCTCA |
| | | ATCGGGCCCACGGGGTCCCTGACAGGTTCAGTGG |
| | | CAGTGGATCAGGCACAGATTTTACACTGAAAATC |
| | | AGCAGAGTGGAGGCTGAGGATGTTGGGGTTTATT |
| | | ACTGCATGCAAGCTCTACAAACTCCGCTCACTTT |
| | | CGGCGGAGGGACCAAGGTAGAGATCAAACGG |
| SS-15507 | 425 | GATATTGTGATGACTCAGTCTCCACTCTCCCTGCC |
| | | CGTCACCCCTGGAGAGCCGGCCTCCATCTCCTGC |
| | | AGGTCTAGTCAGAGCCTCCTGCATAGTTTCGGAT |
| | | ACAACTATTTGGATTGGTACCTGCAGAAGCCAGG |
| | | GCAGTCTCCACAGCTCCTGATCTATTTGGGTCTCA |
| | | ATCGGGCCTCCGGGGTCCCTGACAGGTTCAGTGG |
| | | CAGTGGATCAGGCACAGATTTTACACTGAAAATC |
| | | AGCAGAGTGGAGGCTGAGGATGTTGGGGTTTATT |
| | | ACTGCATGCAAGCTCTACAAACTCCGCTCACTTT |
| | | CGGCGGAGGGACCAAGGTAGAGATCAAACGG |
| SS-15502 | 426 | GATATTGTGATGACTCAGTCTCCACTCTCCCTGCC |
| | | CGTCACCCCTGGAGAGCCGGCCTCCATCTCCTGC |
| | | AGGTCTAGTCAGAGCCTCCTGCATAGTTTCGGAT |
| | | ACAACTATTTGGATTGGTACCTGCAGAAGCCAGG |
| | | GCAGTCTCCACAGCTCCTGATCTATTTGGGTCTCA |
| | | ATCGGGCCTCCGGGGTCCCTGACAGGTTCAGTGG |
| | | CAGTGGATCAGGCACAGATTTTACACTGAAAATC |
| | | AGCAGAGTGGAGGCTGAGGATGTTGGGGTTTATT |
| | | ACTGCATGCAAGCTCTACAAACTCCGCTCACTTT |
| | | CGGCGGAGGGACCAAGGTAGAGATCAAACGG |
| SS-15508 | 427 | GATATTGTGATGACTCAGTCTCCACTCTCCCTGCC |
| | | CGTCACCCCTGGAGAGCCGGCCTCCATCTCCTGC |
| | | AGGTCTAGTCAGAGCCTCCTGCATAGTTTTGGAC |
| | | ACAACTATTTGGATTGGTACCTGCAGAAGCCAGG |
| | | GCAGTCTCCACAGCTCCTGATCTATTTGGGTCTCA |
| | | ATCGGGCCCACGGGGTCCCTGACAGGTTCAGTGG |
| | | CAGTGGATCAGGCACAGATTTTACACTGAAAATC |
| | | AGCAGAGTGGAGGCTGAGGATGTTGGGGTTTATT |
| | | ACTGCATGCAAGCTCTACAAACTCCGCTCACTTT |
| | | CGGCGGAGGGACCAAGGTAGAGATCAAACGG |
| SS-15501 | 428 | GATATTGTGATGACTCAGTCTCCACTCTCCCTGCC |
| | | CGTCACCCCTGGAGAGCCGGCCTCCATCTCCTGC |
| | | AGGTCTAGTCAGAGCCTCCTGCATAGttaTGGACA |
| | | CAACTATTTGGATTGGTACCTGCAGAAGCCAGGG |
| | | CAGTCTCCACAGCTCCTGATCTATTTGGGTCTCAA |
| | | TCGGGCCCACGGGGTCCCTGACAGGTTCAGTGGC |
| | | AGTGGATCAGGCACAGATTTTACACTGAAAATCA |
| | | GCAGAGTGGAGGCTGAGGATGTTGGGGTTTATTA |
| | | CTGCATGCAAGCTCTACAAACTCCGCTCACTTTC |
| | | GGCGGAGGGACCAAGGTAGAGATCAAACGG |
| SS-15500 | 429 | GATATTGTGATGACTCAGTCTCCACTCTCCCTGCC |
| | | CGTCACCCCTGGAGAGCCGGCCTCCATCTCCTGC |
| | | AGGTCTAGTCAGAGCCTCCTGCATAGttaTGGACA |
| | | CAACTATTTGGATTGGTACCTGCAGAAGCCAGGG |
| | | CAGTCTCCACAGCTCCTGATCTATTTGGGTCTCAA |
| | | TCGGGCCCACGGGGTCCCTGACAGGTTCAGTGGC |
| | | AGTGGATCAGGCACAGATTTTACACTGAAAATCA |
| | | GCAGAGTGGAGGCTGAGGATGTTGGGGTTTATTA |
| | | CTGCATGCAAGCTCTACAAACTCCGCTCACTTTC |
| | | GGCGGAGGGACCAAGGTAGAGATCAAACGG |
| SS-15003 | 430 | GAGTCTGTGTTGACGCAGCCGCCCTCAGTGTCTG |
| | | CGGCCCCAGGACAGAAGGTCACCATCTCCTGCTC |
| | | TGGAAGCAGCTCCAACATTGGGAATAATTTTGTA |
| | | TCCTGGTACCAGCAGCTCCCAGGAACAGCCCCCA |
| | | AACTCCTCATTTATGACTATAATAAGCGACCCTC |
| | | AGGGATTCCTGACCGATTCTCTGGCTCCAAGTCT |
| | | GGCACGTCAGCCACCCTGGGCATCACCGGACTCC |
| | | AGACTGGGGACGAGGCCGATTATTACTGCGGAA |
| | | CATGGGATAGCAGCCTGAGTGCTTATGTCTTCGG |
| | | AACTGGGACCAGGGTCACCGTCCTAGGT |
| SS-15005 | 431 | GACATCCAGATGACCCAGTCTCCATCCTCCCTAT |
| | | CTGCATCTGTAGGAGACAGAGTCACCATCACTTG |
| | | CCGGGCAAGTCAGAGCATTAGCATCTATTTAAAT |
| | | TGGTATCAGCAGAAGCCAGGGAAAGCCCCTTACC |
| | | TCCTGATCTATGCTGCAGCCAGTTTGCAAAGTGG |
| | | GGTCCCATCAAGGTTCAGTGGCAGTGGATCTGGG |
| | | ACAGATTTCACTCTCACCATCAGCAGTCTGCAAC |
| | | CTGAAGATTTTGCAACTTACTACTGTCAACAGAG |
| | | TTACAGTGCCCCCATCACCTTCGGCCAAGGGACA |
| | | CGACTGGAGATTAAACGT |
| SS-15757 | 432 | GATATTGTGATGACTCAGTCTCCACTCTCCCTGCC |
| (P1F4) | | CGTCACCCCTGGAGAGCCGGCCTCCATCTCCTGC |
| | | AGGTCTAGTCAGAGCCTCCTGCATAGTAATGGAT |
| | | ACAACTATTTGGATTGGTACCTGCAGAAGCCAGG |
| | | GCAGTCTCCACAGCTCCTGATCTATTTGGGTTCTA |
| | | ATCGGGCCTCCGGGGTCCCTGACAGGTTCAGTGG |
| | | CAGTGGATCAGGCACAGATTTTACACTGAAAATC |
| | | AGCAGAGTGGAGGCTGAGGATGTTGGGGTTTATT |
| | | ACTGCATGCAAGCTATGCAAACTCCGCTCACTTT |
| | | CGGCGGAGGGACCAAGGTAGAGATCAAACGG |
| SS-15758 | 433 | GATATTGTGATGACTCAGTCTCCACTCTCCCTGCC |
| (P1B6) | | CGTCACCCCTGGAGAGCCGGCCTCCATCTCCTGC |
| | | AGGTCTAGTCAGAGCCTCCTGCATAGTAATGGAT |
| | | ACAACTATTTGGATTGGTACCTGCAGAAGCCAGG |
| | | GCAGTCTCCACAGCTCCTGATCTATTTGGGTTCTA |
| | | ATCGGGCCTCCGGGGTCCCTGACAGGTTCAGTGG |
| | | CAGTGGATCAGGCACAGATTTTACACTGAAAATC |
| | | AGCAGAGTGGAGGCTGAGGATGTTGGGGTTTATT |
| | | ACTGCATGCAAGCTCTACAAACTCCGCTCACTTT |
| | | CGGCGGAGGGACCAAGGTAGAGATCAAACGG |
| SS-15759 | 434 | GATATTGTGATGACTCAGTCTCCACTCTCCCTGCC |
| (P2F4) | | CGTCACCCCTGGAGAGCCGGCCTCCATCTCCTGC |
| | | AGGTCTAGTCAGAGCCTCCTGCATAGTAATATGT |
| | | ACAACTATTTGGATTGGTACCTGCAGAAGCCAGG |
| | | GCAGTCTCCACAGCTCCTGATCTATTTGGGTTCTA |
| | | ATCGGGCCTCCGGGGTCCCTGACAGGTTCAGTGG |
| | | CAGTGGATCAGGCACAGATTTTACACTGAAAATC |
| | | AGCAGAGTGGAGGCTGAGGATGTTGGGGTTTATT |
| | | ACTGCATGCAAGCTCTACAAACTCCGCTCACTTT |
| | | CGGCGGAGGGACCAAGGTAGAGATCAAACGG |
| SS-15761 | 435 | GATATTGTGATGACTCAGTCTCCACTCTCCCTGCC |
| (P2G5) | | CGTCACCCCTGGAGAGCCGGCCTCCATCTCCTGC |
| | | AGGTCTAGTCAGAGCCTCCTGCATAGTAATCAGT |
| | | ACAACTATTTGGATTGGTACCTGCAGAAGCCAGG |
| | | GCAGTCTCCACAGCTCCTGATCTATTTGGGTTCTA |
| | | ATCGGGCCTCCGGGGTCCCTGACAGGTTCAGTGG |
| | | CAGTGGATCAGGCACAGATTTTACACTGAAAATC |
| | | AGCAGAGTGGAGGCTGAGGATGTTGGGGTTTATT |
| | | ACTGCATGCAAGCTCTACAAACTCCGCTCACTTT |
| | | CGGCGGAGGGACCAAGGTAGAGATCAAACGG |
| SS-15763 | 436 | GATATTGTGATGACTCAGTCTCCACTCTCCCTGCC |
| (P2H7) | | CGTCACCCCTGGAGAGCCGGCCTCCATCTCCTGC |
| | | AGGTCTAGTCAGAGCCTCATGCATAGTAATGGAT |
| | | ACAACTATTTGGATTGGTACCTGCAGAAGCCAGG |
| | | GCAGTCTCCACAGCTCCTGATCTATTTGGGTTCTA |
| | | ATCGGGCCTCCGGGGTCCCTGACAGGTTCAGTGG |
| | | CAGTGGATCAGGCACAGATTTTACACTGAAAATC |
| | | AGCAGAGTGGAGGCTGAGGATGTTGGGGTTTATT |
| | | ACTGCATGCAAGCTCTACAAACTCCGCTCACTTT |
| | | CGGCGGAGGGACCAAGGTAGAGATCAAACGG |
| SS-15764 | 437 | GATATTGTGATGACTCAGTCTCCACTCTCCCTGCC |
| (P2H8) | | CGTCACCCCTGGAGAGCCGGCCTCCATCTCCTGC |
| | | AGGTCTAGTCAGAGCCTCCTGCATAGTAATGGAT |
| | | ACAACTATTTGGATTGGTACCTGCAGAAGCCAGG |
| | | GCAGTCTCCACAGCTCCTGATCTATTTGGGTATC |
| | | AATCGGGCCTCCGGGGTCCCTGACAGGTTCAGTG |
| | | GCAGTGGATCAGGCACAGATTTTACACTGAAAAT |
| | | CAGCAGAGTGGAGGCTGAGGATGTTGGGGTTTAT |
| | | TACTGCATGCAAGCTCTACAAACTCCGCTCACTT |
| | | TCGGCGGAGGGACCAAGGTAGAGATCAAACGG |

TABLE 2D
Coding Sequence for Antibody Variable
Heavy (V_{H}) Chains

| | SEQ | |
|---|---|---|
| | ID | |
| Ab ID | NO: | Coding Sequence |
| SS-13406 | 438 | GAGGTGCAGCTGGTGGAGTCTGGGGGAGGCTTG |
| (8A3HLE- | | GTCCAGCCTGGGGGGTCCCTGAGACTCTCCTGTG |
| 51) | | CAGCCTCCGGATTCACCTTTAGTAGCTATTGGAT |
| | | GAGCTGGGTCCGCCAGGCTCCAGGGAAGGGGCT |
| | | GGAGTGGGTGGCCAGCATAAAACAAGATGGAAG |
| | | TGAGAAATACTATGTGGACTCTGTGAAGGGCCGA |
| | | TTCACCATCTCCAGAGACAACGCCAGGAACTCAC |
| | | TGTATCTGCAAATGAACAGCCTGAGAGCCGAGG |
| | | ACACGGCTGTGTATTACTGTGCGAGAGATCTTGT |
| | | ATTAATGGTGTATGATATAGACTACTACTACTAC |
| | | GGTATGGACGTCTGGGGCCAAGGGACCACGGTC |
| | | ACCGTCTCCTCA |
| SS-13407 | 439 | GAGGTGCAGCTGGTGGAGTCTGGGGGAGGCTTG |
| (8A3HLE- | | GTCCAGCCTGGGGGGTCCCTGAGACTCTCCTGTG |
| 112) | | CAGCCTCCGGATTCACCTTTAGTAGCTATTGGAT |
| | | GAGCTGGGTCCGCCAGGCTCCAGGGAAGGGGCT |
| | | GGAGTGGGTGGCCAGCATAAAACAAGATGGAAG |
| | | TGAGAAATACTATGTGGACTCTGTGAAGGGCCGA |
| | | TTCACCATCTCCAGAGACAACGCCAGGAACTCAC |
| | | TGTATCTGCAAATGAACAGCCTGAGAGCCGAGG |
| | | ACACGGCTGTGTATTACTGTGCGAGAGATCTTGT |
| | | ATTAATGGTGTATGATATAGACTACTACTACTAC |
| | | GGTATGGACGTCTGGGGCCAAGGGACCACGGTC |
| | | ACCGTCTCCTCA |
| SS-14888 | 440 | GAGGTGCAGCTGGTGGAGTCTGGGGGAGGCTTG |
| (P2C6- | | GTCCAGCCTGGGGGGTCCCTGAGACTCTCCTGTG |
| HLE51) | | CAGCCTCCGGATTCACCTTTAGTAGCTATTGGAT |
| | | GAGCTGGGTCCGCCAGGCTCCAGGGAAGGGGCT |
| | | GGAGTGGGTGGCCAGCATAAAACAAGATGGAAG |
| | | TGAGAAATACTATGTGGACTCTGTGAAGGGCCGA |
| | | TTCACCATCTCCAGAGACAACGCCAGGAACTCAC |
| | | TGTATCTGCAAATGAACAGCCTGAGAGCCGAGG |
| | | ACACGGCTGTGTATTACTGTGCGAGAGATCTTGT |
| | | ATTAATGGTGTATGATATGGACTACTACTACTAC |
| | | GGTATGGACGTCTGGGGCCAAGGGACCACGGTC |
| | | ACCGTCTCCTCA |
| 13G9 | 441 | CAGGTTCAGTTGGTGCAGTCTGGAGCTGAAGTGA |
| | | CGAAGCCTGGGGCCTCAGTGAAGGTCTCCTGCAA |
| | | GGCTTCTGGTTACACCTTTACCAGCTATGGTATCA |
| | | GCTGGGTGCGACAGGCCCCTGGACAAGGGCTTG |
| | | AGTGGATGGGATGGATCAGCGTTTATAAAGGTAA |
| | | CACAAACTATGCACAGAAGCTCCAGGGCAGAGT |
| | | CACCATGACCACAGACACATCCACGAGCACAGC |
| | | CTACATGGAGTTGAGGAGCCTGAGATCTGACGAC |
| | | ACGGCCGTGTATTACTGTGCGAGAAATTACCAAA |
| | | TTTTTTCATTTGACTACTGGGGCCAGGGAACCCT |
| | | GGTCACCGTCTCCTCA |
| 19A12 | 442 | CAGGTGCAGCTGGTGGAGTCTGGGGGAGGCGTG |
| | | GTCCAGCCTGGGAGGTCCCTGAGACTCTCCTGTG |
| | | CAGCGTCTGGATTCACCTTCAGTAGCTATGGCAT |
| | | GCACTGGGTCCGCCAGGCTCCAGGCAAGGGGCT |
| | | GGAGTGGGTGGCAGTTATATGGTATGATGGAAGT |
| | | AATAAATACTATGCAGACTCCGTGAAGGGCCGAT |
| | | TCACCATCTCCAGAGACAATTCCAAGAACACGCT |
| | | GTATCTGCAAATGAACAGCCTGAGAGCCGAGGA |
| | | CACGGCTGTGTATTACTGTGTGAGAGATCGGGGA |
| | | CTGGACTGGGGCCAGGGAACCCTGGTCACCGTCT |
| | | CCTCA |
| 20D12 | 443 | CAGGTGCAGCTACAGCAGTGGGGCGCAGGACTG |
| | | TTGAAGCCTTCGGAGACCCTGTCCCTCACCTGCG |
| | | CTGTCTCTGGTGGGTCCTTCAGAGCTTACTACTGG |
| | | AACTGGATCCGCCAGCCCCCAGGGAAGGGGCTG |
| | | GAGTGGATTGGGGAGATCAATCATAGTGGAAGG |
| | | ACCGACTACAACCCGTCCCTCAAGAGTCGAGTCA |
| | | CCATATCAGTAGACACGTCCAAGAACCAGTTCTC |
| | | CCTGAAGCTGAGCTCTGTGACCGCCGCGGACACG |
| | | GCTGTGTATTACTGTGCGAGAGGGCAGCTCGTCC |
| | | CCTTTGACTACTGGGGCCAGGGAACCCTGGTCAC |
| | | CGTCTCCTCA |
| 25B5 | 444 | CAGATTCAGCTGGTGCAGTCTGGAGCTGAGGTGA |
| | | AGAAGCCTGGGGCCTCAGTGAAGGTCTCCTGCAA |
| | | GGCTTCTGGTTACACCTTGACCAGCTATGGTATC |
| | | AGCTGGGTGCGACAGGCCCCTGGACAAGGGCTT |
| | | GAGTGGATGGGATGGATCAGCTTTTACAATGGTA |
| | | ACACAAACTATGCACAGAAGGTCCAGGGCAGAG |
| | | TCACCATGACCACAGACACATCCACGAGCACAGT |
| | | CTACATGGAGCTGAGGAGCCTGAGATCTGACGAC |
| | | ACGGCCGTGTATTTCTGTGCGAGAGGCTACGGTA |
| | | TGGACGTCTGGGGCCAAGGGACCACGGTCACCGT |
| | | CTCCTCA |
| 30G7 | 445 | CAGGTTCAACTGGTGCAGTCTGGAGCTGAGGTGA |
| | | AGAAGTCTGGGGCCTCAGTGAAGGTCTCCTGCAA |
| | | GGCTTCTGGTTACACCTTGACCAGCTATGGTATC |
| | | AGCTGGGTGCGACAGGCCCCTGGACAAGGGCTT |
| | | GAGTGGATGGGATGGATCAGCGTTTACAATGGTA |
| | | ACACAAACTATGCACAGAAGGTCCAGGGCAGAG |
| | | TCACCATGACCACAGACACATCCACGAGCACAGT |
| | | CTACATGGAGGTGAGGAGCCTGAGATCTGACGA |
| | | CACGGCCGTTTATTATTGTGCGAGAGGCTACGGT |
| | | ATGGACGTCTGGGGCCAAGGGACCACGGTCACC |
| | | GTCTCCTCA |
| SS-15057 | 446 | GAGGTGCAGCTGGTGGAGTCTGGGGGAGGCCTG |
| | | GTCAAGCCTGGGGGGTCCCTGAGACTCTCCTGTG |
| | | CAGCCTCTGGATTCACCCACAGTAGCTATAGCAT |
| | | GAACTGGGTCCGCCAGGCTCCAGGGAAGGGGCT |
| | | GGAGTGGGTCTCATCCATTAGTAGTAGTAGTAGT |
| | | TACATTTCCTACGCAGACTCAGTGAAGGGCCGAT |
| | | TCACCATCTCCAGAGACAACGCCAAGAACTCACT |
| | | GTATCTGCAAATGAACAGCCTGAGAGCCGAGGA |
| | | CACGGCTGTGTATTTCTGTGCGAGAGATTACGAT |
| | | TTTCACAGTGCTTACTATGATGCTTTTGATGTCTG |
| | | GGGCCAAGGGACAATGGTCACCGTCTCTTCA |
| 15058 | 447 | GAGGTGCAGCTGGTGGAGTCTGGGGGAGGCCTG |
| | | GTCAAGCCTGGGGGGTCCCTGAGACTCTCCTGTG |
| | | CAGCCTCTGGATTCACCTTCAGTAGCCACAGCAT |
| | | GAACTGGGTCCGCCAGGCTCCAGGGAAGGGGCT |
| | | GGAGTGGGTCTCATCCATTAGTAGTAGTAGTAGT |
| | | TACATTTCCTACGCAGACTCAGTGAAGGGCCGAT |
| | | TCACCATCTCCAGAGACAACGCCAAGAACTCACT |
| | | GTATCTGCAAATGAACAGCCTGAGAGCCGAGGA |
| | | CACGGCTGTGTATTTCTGTGCGAGAGATTACGAT |
| | | TTTCACAGTGCTTACTATGATGCTTTTGATGTCTG |
| | | GGGCCAAGGGACAATGGTCACCGTCTCTTCA |
| 15059 | 448 | GAGGTGCAGCTGGTGGAGTCTGGGGGAGGCCTG |
| | | GTCAAGCCTGGGGGGTCCCTGAGACTCTCCTGTG |
| | | CAGCCTCTGGATTCACCTTCAGTAGCTATAGCAT |
| | | GAACTGGGTCCGCCAGGCTCCAGGGAAGGGGCT |
| | | GGAGTGGGTCTCATCCATTAGTAGTCACAGTAGT |
| | | TACATTTCCTACGCAGACTCAGTGAAGGGCCGAT |
| | | TCACCATCTCCAGAGACAACGCCAAGAACTCACT |
| | | GTATCTGCAAATGAACAGCCTGAGAGCCGAGGA |
| | | CACGGCTGTGTATTTCTGTGCGAGAGATTACGAT |
| | | TTTCACAGTGCTTACTATGATGCTTTTGATGTCTG |
| | | GGGCCAAGGGACAATGGTCACCGTCTCTTCA |
| 15065 | 449 | GAGGTGCAGCTGGTGGAGTCTGGGGGAGGCCTG |
| | | GTCAAGCCTGGGGGGTCCCTGAGACTCTCCTGTG |
| | | CAGCCTCTGGATTCACCTTCAGTAGCTATAGCAT |
| | | GAACTGGGTCCGCCAGGCTCCAGGGAAGGGGCT |
| | | GGAGTGGGTCTCATCCATTAGTAGTAGTAGTAGT |
| | | TACATTTCCTACGCAGACTCAGTGAAGGGCCGAT |
| | | TCACCATCFCCAGAGACAACGCCAAGAACTCACT |
| | | GTATCTGCAAATGAACAGCCTGAGAGCCGAGGA |
| | | CACGGCTGTGTATTTCTGTGCGAGAGATTACGAT |
| | | TTTCACAGTGCTCACTATGATGCTTTTGATGTCTG |
| | | GGGCCAAGGGACAATGGTCACCGTCTCTTCA |
| 15079 | 450 | GAGGTGCAGCTGGTGGAGTCTGGGGGAGGCCTG |
| | | GTCAAGCCTGGGGGGTCCCTGAGACTCTCCTGTG |
| | | CAGCCTCTGGATTCACCCACAGTAGCTATAGCAT |
| | | GAACTGGGTCCGCCAGGCTCCAGGGAAGGGGCT |
| | | GGAGTGGGTCTCATCCATTAGTAGTAGTAGTAGT |
| | | TACATTTCCTACGCAGACTCAGTGAAGGGCCGAT |
| | | TCACCATCTCCAGAGACAACGCCAAGAACTCACT |
| | | GTATCTGCAAATGAACAGCCTGAGAGCCGAGGA |
| | | CACGGCTGTGTATTTCTGTGCGAGAGATTACGAT |
| | | TTTCACAGTGCTTACTATGATGCTTTTGATGTCTG |
| | | GGGCCAAGGGACAATGGTCACCGTCTCTTCA |
| 15080 | 451 | GAGGTGCAGCTGGTGGAGTCTGGGGGAGGCCTG |
| | | GTCAAGCCTGGGGGGTCCCTGAGACTCTCCTGTG |
| | | CAGCCTCTGGATTCACCTTCAGTAGCCACAGCAT |
| | | GAACTGGGTCCGCCAGGCTCCAGGGAAGGGGCT |
| | | GGAGTGGGTCTCATCCATTAGTAGTAGTAGTAGT |
| | | TACATTTCCTACGCAGACTCAGTGAAGGGCCGAT |
| | | TCACCATCTCCAGAGACAACGCCAAGAACTCACT |
| | | GTATCTGCAAATGAACAGCCTGAGAGCCGAGGA |
| | | CACGGCTGTGTATTTCTGTGCGAGAGATTACGAT |
| | | TTTCACAGTGCTTACTATGATGCTTTTGATGTCTG |
| | | GGGCCAAGGGACAATGGTCACCGTCTCTTCA |
| 15087 | 452 | GAGGTGCAGCTGGTGGAGTCTGGGGGAGGCCTG |
| | | GTCAAGCCTGGGGGGTCCCTGAGACTCTCCTGTG |
| | | CAGCCTCTGGATTCACCTTCAGTAGCTATAGCAT |
| | | GAACTGGGTCCGCCAGGCTCCAGGGAAGGGGCT |
| | | GGAGTGGGTCTCATCCATTAGTAGTAGTAGTAGT |
| | | TACATTTCCTACGCAGACTCAGTGAAGGGCCGAT |
| | | TCACCATCTCCAGAGACAACGCCAAGAACTCACT |
| | | GTATCTGCAAATGAACAGCCTGAGAGCCGAGGA |
| | | CACGGCTGTGTATTTCTGTGCGAGAGATTACGAT |
| | | TTTCACAGTGCTCACTATGATGCTTTTGATGTCTG |
| | | GGGCCAAGGGACAATGGTCACCGTCTCTTCA |
| 15101 | 453 | GAGGTGCAGCTGGTGGAGTCTGGGGGAGGCCTG |
| | | GTCAAGCCTGGGGGGTCCCTGAGACTCTCCTGTG |
| | | CAGCCTCTGGATTCACCCACAGTAGCTATAGCAT |
| | | GAACTGGGTCCGCCAGGCTCCAGGGAAGGGGCT |
| | | GGAGTGGGTCTCATCCATTAGTAGTAGTAGTCAC |
| | | TACATTTCCTACGCAGACTCAGTGAAGGGCCGAT |
| | | TCACCATCTCCAGAGACAACGCCAAGAACTCACT |
| | | GTATCTGCAAATGAACAGCCTGAGAGCCGAGGA |
| | | CACGGCTGTGTATTTCTGTGCGAGAGATTACGAT |
| | | TTTCACAGTGCTTACTATGATGCTTTTGATGTCTG |
| | | GGGCCAAGGGACAATGGTCACCGTCTCTTCA |
| 15103 | 454 | GAGGTGCAGCTGGTGGAGTCTGGGGGAGGCCTG |
| | | GTCAAGCCTGGGGGGTCCCTGAGACTCTCCTGTG |
| | | CAGCCTCTGGATTCACCCACAGTAGCTATAGCAT |
| | | GAACTGGGTCCGCCAGGCTCCAGGGAAGGGGCT |
| | | GGAGTGGGTCTCATCCATTAGTAGTAGTAGTAGT |
| | | TACATTTCCCACGCAGACTCAGTGAAGGGCCGAT |
| | | TCACCATCTCCAGAGACAACGCCAAGAACTCACT |
| | | GTATCTGCAAATGAACAGCCTGAGAGCCGAGGA |
| | | CACGGCTGTGTATTTCTGTGCGAGAGATTACGAT |
| | | TTTCACAGTGCTTACTATGATGCTTTTGATGTCTG |
| | | GGGCCAAGGGACAATGGTCACCGTCTCTTCA |
| 15104 | 455 | GAGGTGCAGCTGGTGGAGTCTGGGGGAGGCCTG |
| | | GTCAAGCCTGGGGGGTCCCTGAGACTCTCCTGTG |
| | | CAGCCTCTGGATTCACCCACAGTAGCTATAGCAT |
| | | GAACTGGGTCCGCCAGGCTCCAGGGAAGGGGCT |
| | | GGAGTGGGTCTCATCCATTAGTAGTAGTAGTAGT |
| | | TACATTTCCTACGCACACTCAGTGAAGGGCCGAT |
| | | TCACCATCTCCAGAGACAACGCCAAGAACTCACT |
| | | GTATCTGCAAATGAACAGCCTGAGAGCCGAGGA |
| | | CACGGCTGTGTATTTCTGTGCGAGAGATTACGAT |
| | | TTTCACAGTGCTTACTATGATGCTTTTGATGTCTG |
| | | GGGCCAAGGGACAATGGTCACCGTCTCTTCA |
| 15105 | 456 | GAGGTGCAGCTGGTGGAGTCTGGGGGAGGCCTG |
| | | GTCAAGCCTGGGGGGTCCCTGAGACTCTCCTGTG |
| | | CAGCCTCTGGATTCACCCACAGTAGCTATAGCAT |
| | | GAACTGGGTCCGCCAGGCTCCAGGGAAGGGGCT |
| | | GGAGTGGGTCTCATCCATTAGTAGTAGTAGTAGT |
| | | TACATTTCCTACGCAGACCACGTGAAGGGCCGAT |
| | | TCACCATCTCCAGAGACAACGCCAAGAACTCACT |
| | | GTATCTGCAAATGAACAGCCTGAGAGCCGAGGA |
| | | CACGGCTGTGTATTTCTGTGCGAGAGATTACGAT |
| | | TTTCACAGTGCTTACTATGATGCTTTTGATGTCTG |
| | | GGGCCAAGGGACAATGGTCACCGTCTCTTCA |
| 15106 | 457 | GAGGTGCAGCTGGTGGAGTCTGGGGGAGGCCTG |
| | | GTCAAGCCTGGGGGGTCCCTGAGACTCTCCTGTG |
| | | CAGCCTCTGGATTCACCCACAGTAGCTATAGCAT |
| | | GAACTGGGTCCGCCAGGCTCCAGGGAAGGGGCT |
| | | GGAGTGGGTCTCATCCATTAGTAGTAGTAGTAGT |
| | | TACATTTCCTACGCAGACTCAGTGAAGGGCCGAT |
| | | TCACCATCTCCAGAGACAACGCCAAGAACTCACT |
| | | GTATCTGCAAATGAACAGCCTGAGAGCCGAGGA |
| | | CACGGCTGTGTATTTCTGTGCGAGAGATTACGAT |
| | | TTTCACAGTGCTCACTATGATGCTTTTGATGTCTG |
| | | GGGCCAAGGGACAATGGTCACCGTCTCTTCA |
| 15108 | 458 | GAGGTGCAGCTGGTGGAGTCTGGGGGAGGCCTG |
| | | GTCAAGCCTGGGGGGTCCCTGAGACTCTCCTGTG |
| | | CAGCCTCTGGATTCACCTTCAGTAGCCACAGCAT |
| | | GAACTGGGTCCGCCAGGCTCCAGGGAAGGGGCT |
| | | GGAGTGGGTCTCATCCATTAGTAGTCACAGTAGT |
| | | TACATTTCCTACGCAGACTCAGTGAAGGGCCGAT |
| | | TCACCATCTCCAGAGACAACGCCAAGAACTCACT |
| | | GTATCTGCAAATGAACAGCCTGAGAGCCGAGGA |
| | | CACGGCTGTGTATTTCTGTGCGAGAGATTACGAT |
| | | TTTCACAGTGCTTACTATGATGCTTTTGATGTCTG |
| | | GGGCCAAGGGACAATGGTCACCGTCTCTTCA |
| 15112 | 459 | GAGGTGCAGCTGGTGGAGTCTGGGGGAGGCCTG |
| | | GTCAAGCCTGGGGGGTCCCTGAGACTCTCCTGTG |
| | | CAGCCTCTGGATTCACCTTCAGTAGCCACAGCAT |
| | | GAACTGGGTCCGCCAGGCTCCAGGGAAGGGGCT |
| | | GGAGTGGGTCTCATCCATTAGTAGTAGTAGTAGT |
| | | TACATTTCCTACGCACACTCAGTGAAGGGCCGAT |
| | | TCACCATCTCCAGAGACAACGCCAAGAACTCACT |
| | | GTATCTGCAAATGAACAGCCTGAGAGCCGAGGA |
| | | CACGGCTGTGTATTTCTGTGCGAGAGATTACGAT |
| | | TTTCACAGTGCTTACTATGATGCTTTTGATGTCTG |
| | | GGGCCAAGGGACAATGGTCACCGTCTCTTCA |
| 15113 | 460 | GAGGTGCAGCTGGTGGAGTCTGGGGGAGGCCTG |
| | | GTCAAGCCTGGGGGGTCCCTGAGACTCTCCTGTG |
| | | CAGCCTCTGGATTCACCTTCAGTAGCCACAGCAT |
| | | GAACTGGGTCCGCCAGGCTCCAGGGAAGGGGCT |
| | | GGAGTGGGTCTCATCCATTAGTAGTAGTAGTAGT |
| | | TACATTTCCTACGCAGACCACGTGAAGGGCCGAT |
| | | TCACCATCTCCAGAGACAACGCCAAGAACTCACT |
| | | GTATCTGCAAATGAACAGCCTGAGAGCCGAGGA |
| | | CACGGCTGTGTATTTCTGTGCGAGAGATTACGAT |
| | | TTTCACAGTGCTTACTATGATGCTTTTGATGTCTG |
| | | GGGCCAAGGGACAATGGTCACCGTCTCTTCA |
| 15114 | 461 | GAGGTGCAGCTGGTGGAGTCTGGGGGAGGCCTG |
| | | GTCAAGCCTGGGGGGTCCCTGAGACTCTCCTGTG |
| | | CAGCCTCTGGATTCACCTTCAGTAGCCACAGCAT |
| | | GAACTGGGTCCGCCAGGCTCCAGGGAAGGGGCT |
| | | GGAGTGGGTCTCATCCATTAGTAGTAGTAGTAGT |
| | | TACATTTCCTACGCAGACTCAGTGAAGGGCCGAT |
| | | TCACCATCTCCAGAGACAACGCCAAGAACTCACT |
| | | GTATCTGCAAATGAACAGCCTGAGAGCCGAGGA |
| | | CACGGCTGTGTATTTCTGTGCGAGAGATTACGAT |
| | | TTTCACAGTGCTCACTATGATGCTTTTGATGTCTG |
| | | GGGCCAAGGGACAATGGTCACCGTCTCTTCA |
| 15117 | 462 | GAGGTGCAGCTGGTGGAGTCTGGGGGAGGCCTG |
| | | GTCAAGCCTGGGGGGTCCCTGAGACTCTCCTGTG |
| | | CAGCCTCTGGATTCACCTTCAGTAGCTATAGCAT |
| | | GAACTGGGTCCGCCAGGCTCCAGGGAAGGGGCT |
| | | GGAGTGGGTCTCATCCATTAGTAGTCACAGTAGT |
| | | TACCACTCCTACGCAGACTCAGTGAAGGGCCGAT |
| | | TCACCATCTCCAGAGACAACGCCAAGAACTCACT |
| | | GTATCTGCAAATGAACAGCCTGAGAGCCGAGGA |
| | | CACGGCTGTGTATTTCTGTGCGAGAGATTACGAT |
| | | TTTCACAGTGCTTACTATGATGCTTTTGATGTCTG |
| | | GGGCCAAGGGACAATGGTCACCGTCTCTTCA |
| 15121 | 463 | GAGGTGCAGCTGGTGGAGTCTGGGGGAGGCCTG |
| | | GTCAAGCCTGGGGGGTCCCTGAGACTCTCCTGTG |
| | | CAGCCTCTGGATTCACCTTCAGTAGCTATAGCAT |
| | | GAACTGGGTCCGCCAGGCTCCAGGGAAGGGGCT |
| | | GGAGTGGGTCTCATCCATTAGTAGTCACAGTAGT |
| | | TACATTTCCTACGCAGACTCAGTGAAGGGCCGAT |
| | | TCACCATCTCCAGAGACAACGCCAAGAACTCACT |
| | | GTATCTGCAAATGAACAGCCTGAGAGCCGAGGA |
| | | CACGGCTGTGTATTTCTGTGCGAGAGATTACGAT |
| | | TTTCACAGTGCTCACTATGATGCTTTTGATGTCTG |
| | | GGGCCAAGGGACAATGGTCACCGTCTCTTCA |
| 15123 | 464 | GAGGTGCAGCTGGTGGAGTCTGGGGGAGGCCTG |
| | | GTCAAGCCTGGGGGGTCCCTGAGACTCTCCTGTG |
| | | CAGCCTCTGGATTCACCTTCAGTAGCTATAGCAT |
| | | GAACTGGGTCCGCCAGGCTCCAGGGAAGGGGCT |
| | | GGAGTGGGTCTCATCCATTAGTAGTAGTAGTCAC |
| | | TACCACTCCTACGCAGACTCAGTGAAGGGCCGAT |
| | | TCACCATCTCCAGAGACAACGCCAAGAACTCACT |
| | | GTATCTGCAAATGAACAGCCTGAGAGCCGAGGA |
| | | CACGGCTGTGTATTTCTGTGCGAGAGATTACGAT |
| | | TTTCACAGTGCTTACTATGATGCTTTTGATGTCTG |
| | | GGGCCAAGGGACAATGGTCACCGTCTCTTCA |
| 15124 | 465 | GAGGTGCAGCTGGTGGAGTCTGGGGGAGGCCTG |
| | | GTCAAGCCTGGGGGGTCCCTGAGACTCTCCTGTG |
| | | CAGCCTCTGGATTCACCTTCAGTAGCTATAGCAT |
| | | GAACTGGGTCCGCCAGGCTCCAGGGAAGGGGCT |
| | | GGAGTGGGTCTCATCCATTAGTAGTAGTAGTCAC |
| | | TACATTTCCCACGCAGACTCAGTGAAGGGCCGAT |
| | | TCACCATCTCCAGAGACAACGCCAAGAACTCACT |
| | | GTATCTGCAAATGAACAGCCTGAGAGCCGAGGA |
| | | CACGGCTGTGTATTTCTGTGCGAGAGATTACGAT |
| | | TTTCACAGTGCTTACTATGATGCTTTTGATGTCTG |
| | | GGGCCAAGGGACAATGGTCACCGTCTCTTCA |
| 15126 | 466 | GAGGTGCAGCTGGTGGAGTCTGGGGGAGGCCTG |
| | | GTCAAGCCTGGGGGGTCCCTGAGACTCTCCTGTG |
| | | CAGCCTCTGGATTCACCTTCAGTAGCTATAGCAT |
| | | GAACTGGGTCCGCCAGGCTCCAGGGAAGGGGCT |
| | | GGAGTGGGTCTCATCCATTAGTAGTAGTAGTCAC |
| | | TACATTTCCTACGCAGACCACGTGAAGGGCCGAT |
| | | TCACCATCTCCAGAGACAACGCCAAGAACTCACT |
| | | GTATCTGCAAATGAACAGCCTGAGAGCCGAGGA |
| | | CACGGCTGTGTATTTCTGTGCGAGAGATTACGAT |
| | | TTTCACAGTGCTTACTATGATGCTTTTGATGTCTG |
| | | GGGCCAAGGGACAATGGTCACCGTCTCTTCA |
| 15132 | 467 | GAGGTGCAGCTGGTGGAGTCTGGGGGAGGCCTG |
| | | GTCAAGCCTGGGGGGTCCCTGAGACTCTCCTGTG |
| | | CAGCCTCTGGATTCACCTTCAGTAGCTATAGCAT |
| | | GAACTGGGTCCGCCAGGCTCCAGGGAAGGGGCT |
| | | GGAGTGGGTCTCATCCATTAGTAGTAGTAGTAGT |
| | | TACCACTCCTACGCAGACTCAGTGAAGGGCCGAT |
| | | TCACCATCTCCAGAGACAACGCCAAGAACTCACT |
| | | GTATCTGCAAATGAACAGCCTGAGAGCCGAGGA |
| | | CACGGCTGTGTATTTCTGTGCGAGAGATTACGAT |
| | | TTTCACAGTGCTCACTATGATGCTTTTGATGTCTG |
| | | GGGCCAAGGGACAATGGTCACCGTCTCTTCA |
| 15133 | 468 | GAGGTGCAGCTGGTGGAGTCTGGGGGAGGCCTG |
| | | GTCAAGCCTGGGGGGTCCCTGAGACTCTCCTGTG |
| | | CAGCCTCTGGATTCACCTTCAGTAGCTATAGCAT |
| | | GAACTGGGTCCGCCAGGCTCCAGGGAAGGGGCT |
| | | GGAGTGGGTCTCATCCATTAGTAGTAGTAGTAGT |
| | | TACCACTCCTACGCAGACTCAGTGAAGGGCCGAT |
| | | TCACCATCTCCAGAGACAACGCCAAGAACTCACT |
| | | GTATCTGCAAATGAACAGCCTGAGAGCCGAGGA |
| | | CACGGCTGTGTATTTCTGTGCGAGAGATTACGAT |
| | | TTTCACAGTGCTTACCACGATGCTTTTGATGTCTG |
| | | GGGCCAAGGGACAATGGTCACCGTCTCTTCA |
| 15136 | 469 | GAGGTGCAGCTGGTGGAGTCTGGGGGAGGCCTG |
| | | GTCAAGCCTGGGGGGTCCCTGAGACTCTCCTGTG |
| | | CAGCCTCTGGATTCACCTTCAGTAGCTATAGCAT |
| | | GAACTGGGTCCGCCAGGCTCCAGGGAAGGGGCT |
| | | GGAGTGGGTCTCATCCATTAGTAGTAGTAGTAGT |
| | | TACATTTCCCACGCAGACTCAGTGAAGGGCCGAT |
| | | TCACCATCTCCAGAGACAACGCCAAGAACTCACT |
| | | GTATCTGCAAATGAACAGCCTGAGAGCCGAGGA |
| | | CACGGCTGTGTATTTCTGTGCGAGAGATTACGAT |
| | | TTTCACAGTGCTCACTATGATGCTTTTGATGTCTG |
| | | GGGCCAAGGGACAATGGTCACCGTCTCTTCA |
| 15139 | 470 | GAGGTGCAGCTGGTGGAGTCTGGGGGAGGCCTG |
| | | GTCAAGCCTGGGGGGTCCCTGAGACTCTCCTGTG |
| | | CAGCCTCTGGATTCACCTTCAGTAGCTATAGCAT |
| | | GAACTGGGTCCGCCAGGCTCCAGGGAAGGGGCT |
| | | GGAGTGGGTCTCATCCATTAGTAGTAGTAGTAGT |
| | | TACATTTCCTACGCACACTCAGTGAAGGGCCGAT |
| | | TCACCATCTCCAGAGACAACGCCAAGAACTCACT |
| | | GTATCTGCAAATGAACAGCCTGAGAGCCGAGGA |
| | | CACGGCTGTGTATTTCTGTGCGAGAGATTACGAT |
| | | TTTCACAGTGCTCACTATGATGCTTTTGATGTCTG |
| | | GGGCCAAGGGACAATGGTCACCGTCTCTTCA |
| 15140 | 471 | GAGGTGCAGCTGGTGGAGTCTGGGGGAGGCCTG |
| | | GTCCAGCCTGGGGGGTCCCTGAGACTCTCCTGTG |
| | | CAGCCTCTGGATTCACCTTCAGTAGCTATAGCAT |
| | | GAACTGGGTCCGCCAGGCTCCAGGGAAGGGGCT |
| | | GGAGTGGGTCTCATCCATTAGTAGTAGTAGTAGT |
| | | TACATTTCCTACGCACACTCAGTGAAGGGCCGAT |
| | | TCACCATCTCCAGAGACAACGCCAAGAACTCACT |
| | | GTATCTGCAAATGAACAGCCTGAGAGCCGAGGA |
| | | CACGGCTGTGTATTTCTGTGCGAGAGATTACGAT |
| | | TTTCACAGTGCTTACCACGATGCTTTTGATGTCTG |
| | | GGGCCAAGGGACAATGGTCACCGTCTCTTCA |
| 15141 | 472 | GAGGTGCAGCTGGTGGAGTCTGGGGGAGGCCTG |
| | | GTCAAGCCTGGGGGGTCCCTGAGACTCTCCTGTG |
| | | CAGCCTCTGGATTCACCTTCAGTAGCTATAGCAT |
| | | GAACTGGGTCCGCCAGGCTCCAGGGAAGGGGCT |
| | | GGAGTGGGTCTCATCCATTAGTAGTAGTAGTAGT |
| | | TACATTTCCTACGCAGACCACGTGAAGGGCCGAT |
| | | TCACCATCTCCAGAGACAACGCCAAGAACTCACT |
| | | GTATCTGCAAATGAACAGCCTGAGAGCCGAGGA |
| | | CACGGCTGTGTATTTCTGTGCGAGAGATTACGAT |
| | | TTTCACAGTGCTCACTATGATGCTTTTGATGTCTG |
| | | GGGCCAAGGGACAATGGTCACCGTCTCTTCA |
| SS-13983 | 473 | GAGGTGCAGCTGGTGGAGTCTGGGGGAGGCTTG |
| A01 | | GTCCAGCCTGGGGGGTCCCTGAGACTCTCCTGTG |
| | | CAGCCTCCGGATTCACCTTTAGTAGCTATTGGAT |
| | | GAGCTGGGTCCGCCAGGCTCCAGGGAAGGGGCT |
| | | GGAGTGGGTGGCCAGCATAAAACAAGATGGAAG |
| | | TGAGAAATACTATGTGGACTCTGTGAAGGGCCGA |
| | | TTCACCATCTCCAGAGACAACGCCAGGAACTCAC |
| | | TGTATCTGCAAATGAACAGCCTGAGAGCCGAGG |
| | | ACACGGCTGTGTATTACTGTGCGAGAGATCTTGT |
| | | ATTAATGGTGTATGATATAGACTACTACTACTAC |
| | | GGTATGGACGTCTGGGGCCAAGGGACCACGGTC |
| | | ACCGTCTCCTCA |
| SS-13991 | 474 | GAGGTGCAGCTGGTGGAGTCTGGGGGAGGCTTG |
| A02 | | GTCCAGCCTGGGGGGTCCCTGAGACTCTCCTGTG |
| | | CAGCCTCCGGATTCACCTTTAGTAGCTATTGGAT |
| | | GAGCTGGGTCCGCCAGGCTCCAGGGAAGGGGCT |
| | | GGAGTGGGTGGCCAGCATAAAACAAGATGGAAG |
| | | TGAGAAATACTATGTGGACTCTGTGAAGGGCCGA |
| | | TTCACCATCTCCAGAGACAACGCCAGGAACTCAC |
| | | TGTATCTGCAAATGAACAGCCTGAGAGCCGAGG |
| | | ACACGGCTGTGTATTACTGTGCGAGAGATCTTGT |
| | | ATTAATGGTGTATGATATAGACTACTACTACTAC |
| | | GGTATGGACGTCTGGGGCCAAGGGACCACGGTC |
| | | ACCGTCTCCTCA |
| SS-13993 | 475 | GAGGTGCAGCTGGTGGAGTCTGGGGGAGGCTTG |
| C02 | | GTCCAGCCTGGGGGGTCCCTGAGACTCTCCTGTG |
| | | CAGCCTCCGGATTCACCTTTAGTAGCTATTGGAT |
| | | GAGCTGGGTCCGCCAGGCTCCAGGGAAGGGGCT |
| | | GGAGTGGGTGGCCAGCATAAAACAAGATGGAAG |
| | | TGAGAAATACTATGTGGACTCTGTGAAGGGCCGA |
| | | TTCACCATCTCCAGAGACAACGCCAGGAACTCAC |
| | | TGTATCTGCAAATGAACAGCCTGAGAGCCGAGG |
| | | ACACGGCTGTGTATTACTGTGCGAGAGATCTTGT |
| | | ATTAATGGTGTATGATATAGACTACTACTACTAC |
| | | GGTATGGACGTCTGGGGCCAAGGGACCACGGTC |
| | | ACCGTCTCCTCA |
| SS-12685 | 476 | GAGGTGCAGCTGGTGGAGTCTGGGGGAGGCTTG |
| P1B1 | | GTCCAGCCTGGGGGGTCCCTGAGACTCTCCTGTG |
| | | CAGCCTCCGGATTCACCTTTAGTAGCTATTGGAT |
| | | GAGCTGGGTCCGCCAGGCTCCAGGGAAGGGGCT |
| | | GGAGTGGGTGGCCAGCATAAAACAAGATGGAAG |
| | | TGAGAAATACTATGTGGACTCTGTGAAGGGCCGA |
| | | TTCACCATCTCCAGAGACAACGCCAGGAACTCAC |
| | | TGTATCTGCAAATGAACAGCCTGAGAGCCGAGG |
| | | ACACGGCTGTGTATTACTGTGCGAGAGATCTTGT |
| | | ATTAATGGTGTATGATATGGACTACTACTACTAC |
| | | GGTATGGACGTCTGGGGCCAAGGGACCACGGTC |
| | | ACCGTCTCCTCA |
| SS-12686 | 477 | GAGGTGCAGCTGGTGGAGTCTGGGGGAGGCTTG |
| P2F5 | | GTCCAGCCTGGGGGGTCCCTGAGACTCTCCTGTG |
| | | CAGCCTCCGGATTCACCTTTAGTAGCTATTGGAT |
| | | GAGCTGGGTCCGCCAGGCTCCAGGGAAGGGGCT |
| | | GGAGTGGGTGGCCAGCATAAAACAAGATGGAAG |
| | | TGAGAAATACTATGTGGACTGTGTGAAGGGCCGA |
| | | TTCACCATCTCCAGAGACAACGCCAGGAACTCAC |
| | | TGTATCTGCAAATGAACAGCCTGAGAGCCGAGG |
| | | ACACGGCTGTGTATTACTGTGCGAGAGATCTTGT |
| | | ATTAATGGTGTATGATATGGACTACTACTACTAC |
| | | GGTATGGACGTCTGGGGCCAAGGGACCACGGTC |
| | | ACCGTCTCCTCA |
| SS-12687 | 478 | GAGGTGCAGCTGGTGGAGTCTGGGGGAGGCTTG |
| P2C6 | | GTCCAGCCTGGGGGGTCCCTGAGACTCTCCTGTG |
| | | CAGCCTCCGGATTCACCTTTAGTAGCTATTGGAT |
| | | GAGCTGGGTCCGCCAGGCTCCAGGGAAGGGGCT |
| | | GGAGTGGGTGGCCAGCATAAAACAAGATGGAAG |
| | | TGAGAAATACTATGTGGACTCTGTGAAGGGCCGA |
| | | TTCACCATCTCCAGAGACAACGCCAGGAACTCAC |
| | | TGTATCTGCAAATGAACAGCCTGAGAGCCGAGG |
| | | ACACGGCTGTGTATTACTGTGCGAGAGATCTTGT |
| | | ATTAATGGTGTATGATATGGACTACTACTACTAC |
| | | GGTATGGACGTCTGGGGCCAAGGGACCACGGTC |
| | | ACCGTCTCCTCA |
| SS-14892 | 479 | GAGGTGCAGCTGGTGGAGTCTGGGGGAGGCTTG |
| P2F5/P2C6 | | GTCCAGCCTGGGGGGTCCCTGAGACTCTCCTGTG |
| | | CAGCCTCCGGATTCACCTTTAGTAGCTATTGGAT |
| | | GAGCTGGGTCCGCCAGGCTCCAGGGAAGGGGCT |
| | | GGAGTGGGTGGCCAGCATAAAACAAGATGGAAG |
| | | TGAGAAATACTATGTGGACTGTGTGAAGGGCCGA |
| | | TTCACCATCTCCAGAGACAACGCCAGGAACTCAC |
| | | TGTATCTGCAAATGAACAGCCTGAGAGCCGAGG |
| | | ACACGGCTGTGTATTACTGTGCGAGAGATCTTGT |
| | | ATTAATGGTGTATGATATGGACTACTACTACTAC |
| | | GGTATGGACGTCTGGGGCCAAGGGACCACGGTC |
| | | ACCGTCTCCTCA |
| SS-15509 | 480 | GAGGTGCAGCTGGTGGAGTCTGGGGGAGGCTTG |
| | | GTCCAGCCTGGGGGGTCCCTGAGACTCTCCTGTG |
| | | CAGCCTCCGGATTCACCTTTAGTAGCTATTGGAT |
| | | GAGCTGGGTCCGCCAGGCTCCAGGGAAGGGGCT |
| | | GGAGTGGGTGGCCAGCATAAAACAAGATGGAAG |
| | | TGAGAAATACTATGTGGACTCTGTGAAGGGCCGA |
| | | TTCACCATCTCCAGAGACAACGCCAGGAACTCAC |
| | | TGTATCTGCAAATGAACAGCCTGAGAGCCGAGG |
| | | ACACGGCTGTGTATTACTGTGCGAGAGATCTTGT |
| | | ATTATTCGTGTATGACATGGACTACTACTACTAC |
| | | GGTATGGACGTCTGGGGCCAAGGGACCACGGTC |
| | | ACCGTCTCCTCA |
| SS-15510 | 481 | GAGGTGCAGCTGGTGGAGTCTGGGGGAGGCTTG |
| | | GTCCAGCCTGGGGGGTCCCTGAGACTCTCCTGTG |
| | | CAGCCTCCGGATTCACCTTTAGTAGCTATTGGAT |
| | | GAGCTGGGTCCGCCAGGCTCCAGGGAAGGGGCT |
| | | GGAGTGGGTGGCCAGCATAAAACAAGATGGAAG |
| | | TGAGAAATACTATGTGGACTGTGTGAAGGGCCGA |
| | | TTCACCATCTCCAGAGACAACGCCAGGAACTCAC |
| | | TGTATCTGCAAATGAACAGCCTGAGAGCCGAGG |
| | | ACACGGCTGTGTATTACTGTGCGAGAGATCTTGT |
| | | ATTATTCGTGTATGACATGGACTACTACTACTAC |
| | | GGTATGGACGTCTGGGGCCAAGGGACCACGGTC |
| | | ACCGTCTCCTCA |
| SS-15511 | 482 | GAGGTGCAGCTGGTGGAGTCTGGGGGAGGCTTG |
| | | GTCCAGCCTGGGGGGTCCCTGAGACTCTCCTGTG |
| | | CAGCCTCCGGATTCACCTTTAGTAGCTATTGGAT |
| | | GAGCTGGGTCCGCCAGGCTCCAGGGAAGGGGCT |
| | | GGAGTGGGTGGCCAGCATAAAACAAGATGGAAG |
| | | TGAGAAATACTATGTGGACTCTGTGAAGGGCCGA |
| | | TTCACCATCTCCAGAGACAACGCCAGGAACTCAC |
| | | TGTATCTGCAAATGAACAGCCTGAGAGCCGAGG |
| | | ACACGGCTGTGTATTACTGTGCGAGAGATCTTGT |
| | | ATTATTCGTGTATGACATGGACTACTACTACTAC |
| | | GGTATGGACGTCTGGGGCCAAGGGACCACGGTC |
| | | ACCGTCTCCTCA |
| SS-15512 | 483 | GAGGTGCAGCTGGTGGAGTCTGGGGGAGGCTTG |
| | | GTCCAGCCTGGGGGGTCCCTGAGACTCTCCTGTG |
| | | CAGCCTCCGGATTCACCTTTAGTAGCTATTGGAT |
| | | GAGCTGGGTCCGCCAGGCTCCAGGGAAGGGGCT |
| | | GGAGTGGGTGGCCAGCATAAAACAAGATGGAAG |
| | | TGAGAAATACTATGTGGACTGTGTGAAGGGCCGA |
| | | TTCACCATCTCCAGAGACAACGCCAGGAACTCAC |
| | | TGTATCTGCAAATGAACAGCCTGAGAGCCGAGG |
| | | ACACGGCTGTGTATTACTGTGCGAGAGATCTTGT |
| | | ATTATTCGTGTATGACATGGACTACTACTACTAC |
| | | GGTATGGACGTCTGGGGCCAAGGGACCACGGTC |
| | | ACCGTCTCCTCA |
| SS-15513 | 484 | GAGGTGCAGCTGGTGGAGTCTGGGGGAGGCTTG |
| | | GTCCAGCCTGGGGGGTCCCTGAGACTCTCCTGTG |
| | | CAGCCTCCGGATTCACCTTTAGTAGCTATTGGAT |
| | | GAGCTGGGTCCGCCAGGCTCCAGGGAAGGGGCT |
| | | GGAGTGGGTGGCCAGCATAAAACAAGATGGAAG |
| | | TGAGAAATACTATGTGGACTCTGTGAAGGGCCGA |
| | | TTCACCATCTCCAGAGACAACGCCAGGAACTCAC |
| | | TGTATCTGCAAATGAACAGCCTGAGAGCCGAGG |
| | | ACACGGCTGTGTATTACTGTGCGAGAGATCTTGT |
| | | ATTATTCGTGTATGACATGGACTACTACTACTAC |
| | | GGTATGGACGTCTGGGGCCAAGGGACCACGGTC |
| | | ACCGTCTCCTCA |
| SS-15514 | 485 | GAGGTGCAGCTGGTGGAGTCTGGGGGAGGCTTG |
| | | GTCCAGCCTGGGGGGTCCCTGAGACTCTCCTGTG |
| | | CAGCCTCCGGATTCACCTTTAGTAGCTATTGGAT |
| | | GAGCTGGGTCCGCCAGGCTCCAGGGAAGGGGCT |
| | | GGAGTGGGTGGCCAGCATAAAACAAGATGGAAG |
| | | TGAGAAATACTATGTGGACTGTGTGAAGGGCCGA |
| | | TTCACCATCTCCAGAGACAACGCCAGGAACTCAC |
| | | TGTATCTGCAAATGAACAGCCTGAGAGCCGAGG |
| | | ACACGGCTGTGTATTACTGTGCGAGAGATCTTGT |
| | | ATTATTCGTGTATGACATGGACTACTACTACTAC |
| | | GGTATGGACGTCTGGGGCCAAGGGACCACGGTC |
| | | ACCGTCTCCTCA |
| SS-15497 | 486 | GAGGTGCAGCTGGTGGAGTCTGGGGGAGGCTTG |
| | | GTCCAGCCTGGGGGGTCCCTGAGACTCTCCTGTG |
| | | CAGCCTCCGGATTCACCTTTAGTAGCTATTGGAT |
| | | GAGCTGGGTCCGCCAGGCTCCAGGGAAGGGGCT |
| | | GGAGTGGGTGGCCAGCATAAAACAAGATGGAAG |
| | | TGAGAAATACTATGTGGACTCTGTGAAGGGCCGA |
| | | TTCACCATCTCCAGAGACAACGCCAGGAACTCAC |
| | | TGTATCTGCAAATGAACAGCCTGAGAGCCGAGG |
| | | ACACGGCTGTGTATTACTGTGCGAGAGATCTTGT |
| | | ATTATCGGTGTATGACATGGACTACTACTACTAC |
| | | GGTATGGACGTCTGGGGCCAAGGGACCACGGTC |
| | | ACCGTCTCCTCA |
| SS-15515 | 487 | GAGGTGCAGCTGGTGGAGTCTGGGGGAGGCTTG |
| | | GTCCAGCCTGGGGGGTCCCTGAGACTCTCCTGTG |
| | | CAGCCTCCGGATTCACCTTTAGTAGCTATTGGAT |
| | | GAGCTGGGTCCGCCAGGCTCCAGGGAAGGGGCT |
| | | GGAGTGGGTGGCCAGCATAAAACAAGATGGAAG |
| | | TGAGAAATACTATGTGGACTCTGTGAAGGGCCGA |
| | | TTCACCATCTCCAGAGACAACGCCAGGAACTCAC |
| | | TGTATCTGCAAATGAACAGCCTGAGAGCCGAGG |
| | | ACACGGCTGTGTATTACTGTGCGAGAGATCTTGT |
| | | ATTATCGGTGTATGACATGGACTACTACTACTAC |
| | | GGTATGGACGTCTGGGGCCAAGGGACCACGGTC |
| | | ACCGTCTCCTCA |
| SS-15516 | 488 | GAGGTGCAGCTGGTGGAGTCTGGGGGAGGCTTG |
| | | GTCCAGCCTGGGGGGTCCCTGAGACTCTCCTGTG |
| | | CAGCCTCCGGATTCACCTTTAGTAGCTATTGGAT |
| | | GAGCTGGGTCCGCCAGGCTCCAGGGAAGGGGCT |
| | | GGAGTGGGTGGCCAGCATAAAACAAGATGGAAG |
| | | TGAGAAATACTATGTGGACTCTGTGAAGGGCCGA |
| | | TTCACCATCTCCAGAGACAACGCCAGGAACTCAC |
| | | TGTATCTGCAAATGAACAGCCTGAGAGCCGAGG |
| | | ACACGGCTGTGTATTACTGTGCGAGAGATCTTGT |
| | | ATTATCGGTGTATGACATGGACTACTACTACTAC |
| | | GGTATGGACGTCTGGGGCCAAGGGACCACGGTC |
| | | ACCGTCTCCTCA |
| SS-15517 | 489 | GAGGTGCAGCTGGTGGAGTCTGGGGGAGGCTTG |
| | | GTCCAGCCTGGGGGGTCCCTGAGACTCTCCTGTG |
| | | CAGCCTCCGGATTCACCTTTAGTAGCTATTGGAT |
| | | GAGCTGGGTCCGCCAGGCTCCAGGGAAGGGGCT |
| | | GGAGTGGGTGGCCAGCATAAAACAAGATGGAAG |
| | | TGAGAAATACTATGTGGACTCTGTGAAGGGCCGA |
| | | TTCACCATCTCCAGAGACAACGCCAGGAACTCAC |
| | | TGTATCTGCAAATGAACAGCCTGAGAGCCGAGG |
| | | ACACGGCTGTGTATTACTGTGCGAGAGATCTTGT |
| | | ATTATCGGTGTATGACATGGACTACTACTACTAC |
| | | GGTATGGACGTCTGGGGCCAAGGGACCACGGTC |
| | | ACCGTCTCCTCA |
| SS-15518 | 490 | GAGGTGCAGCTGGTGGAGTCTGGGGGAGGCTTG |
| | | GTCCAGCCTGGGGGGTCCCTGAGACTCTCCTGTG |
| | | CAGCCTCCGGATTCACCTTTAGTAGCTATTGGAT |
| | | GAGCTGGGTCCGCCAGGCTCCAGGGAAGGGGCT |
| | | GGAGTGGGTGGCCAGCATAAAACAAGATGGAAG |
| | | TGAGAAATACTATGTGGACTCTGTGAAGGGCCGA |
| | | TTCACCATCTCCAGAGACAACGCCAGGAACTCAC |
| | | TGTATCTGCAAATGAACAGCCTGAGAGCCGAGG |
| | | ACACGGCTGTGTATTACTGTGCGAGAGATCTTGT |
| | | ATTATCGGTGTATGACATGGACTACTACTACTAC |
| | | GGTATGGACGTCTGGGGCCAAGGGACCACGGTC |
| | | ACCGTCTCCTCA |
| SS-15519 | 491 | GAGGTGCAGCTGGTGGAGTCTGGGGGAGGCTTG |
| | | GTCCAGCCTGGGGGGTCCCTGAGACTCTCCTGTG |
| | | CAGCCTCCGGATTCACCTTTAGTAGCTATTGGAT |
| | | GAGCTGGGTCCGCCAGGCTCCAGGGAAGGGGCT |
| | | GGAGTGGGTGGCCAGCATAAAACAAGATGGAAG |
| | | TGAGAAATACTATGTGGACTCTGTGAAGGGCCGA |
| | | TTCACCATCTCCAGAGACAACGCCAGGAACTCAC |
| | | TGTATCTGCAAATGAACAGCCTGAGAGCCGAGG |
| | | ACACGGCTGTGTATTACTGTGCGAGAGATCTTGT |
| | | ATTATCGGTGTATGACATGGACTACTACTACTAC |
| | | GGTATGGACGTCTGGGGCCAAGGGACCACGGTC |
| | | ACCGTCTCCTCA |
| SS-15520 | 492 | GAGGTGCAGCTGGTGGAGTCTGGGGGAGGCTTG |
| | | GTCCAGCCTGGGGGGTCCCTGAGACTCTCCTGTG |
| | | CAGCCTCCGGATTCACCTTTAGTAGCTATTGGAT |
| | | GAGCTGGGTCCGCCAGGCTCCAGGGAAGGGGCT |
| | | GGAGTGGGTGGCCAGCATAAAACAAGATGGAAG |
| | | TGAGAAATACTATGTGGACTCTGTGAAGGGCCGA |
| | | TTCACCATCTCCAGAGACAACGCCAGGAACTCAC |
| | | TGTATCTGCAAATGAACAGCCTGAGAGCCGAGG |
| | | ACACGGCTGTGTATTACTGTGCGAGAGATCTTGT |
| | | ATTATCGGTGTATGACATGGACTACTACTACTAC |
| | | GGTATGGACGTCTGGGGCCAAGGGACCACGGTC |
| | | ACCGTCTCCTCA |
| SS-15522 | 493 | GAGGTGCAGCTGGTGGAGTCTGGGGGAGGCTTG |
| | | GTCCAGCCTGGGGGGTCCCTGAGACTCTCCTGTG |
| | | CAGCCTCCGGATTCACCTTTAGTAGCTATTGGAT |
| | | GAGCTGGGTCCGCCAGGCTCCAGGGAAGGGGCT |
| | | GGAGTGGGTGGCCAGCATAAAACAAGATGGAAG |
| | | TGAGAAATACTATGTGGACTCTGTGAAGGGCCGA |
| | | TTCACCATCTCCAGAGACAACGCCAGGAACTCAC |
| | | TGTATCTGCAAATGAACAGCCTGAGAGCCGAGG |
| | | ACACGGCTGTGTATTACTGTGCGAGAGATCTTGT |
| | | ATTATCGGTGTATGACATGGACTACTACTACTAC |
| | | GGTATGGACGTCTGGGGCCAAGGGACCACGGTC |
| | | ACCGTCTCCTCA |
| SS-15524 | 494 | GAGGTGCAGCTGGTGGAGTCTGGGGGAGGCTTG |
| | | GTCCAGCCTGGGGGGTCCCTGAGACTCTCCTGTG |
| | | CAGCCTCCGGATTCACCTTTAGTAGCTATTGGAT |
| | | GAGCTGGGTCCGCCAGGCTCCAGGGAAGGGGCT |
| | | GGAGTGGGTGGCCAGCATAAAACAAGATGGAAG |
| | | TGAGAAATACTATGTGGACTCTGTGAAGGGCCGA |
| | | TTCACCATCTCCAGAGACAACGCCAGGAACTCAC |
| | | TGTATCTGCAAATGAACAGCCTGAGAGCCGAGG |
| | | ACACGGCTGTGTATTACTGTGCGAGAGATCTTGT |
| | | ATTATTCGTGTATGACATGGACTACTACTACTAC |
| | | GGTATGGACGTCTGGGGCCAAGGGACCACGGTC |
| | | ACCGTCTCCTCA |
| SS-14835 | 495 | GAGGTGCAGCTGGTGGAGTCTGGGGGAGGCTTG |
| | | GTCCAGCCTGGGGGGTCCCTGAGACTCTCCTGTG |
| | | CAGCCTCCGGATTCACCTTTAGTAGCTATTGGAT |
| | | GAGCTGGGTCCGCCAGGCTCCAGGGAAGGGGCT |
| | | GGAGTGGGTGGCCAGCATAAAACAAGATGGAAG |
| | | TGAGAAATACTATGTGGACTCTGTGAAGGGCCGA |
| | | TTCACCATCTCCAGAGACAACGCCAGGAACTCAC |
| | | TGTATCTGCAAATGAACAGCCTGAGAGCCGAGG |
| | | ACACGGCTGTGTATTACTGTGCGAGAGATCTTGT |
| | | ATTAATGGTGTATGATATAGACTACTACTACTAC |
| | | GGTATGGACGTCTGGGGCCAAGGGACCACGGTC |
| | | ACCGTCTCCTCA |
| SS-15194 | 496 | GAGGTGCAGCTGGTGGAGTCTGGGGGAGGCTTG |
| | | GTCCAGCCTGGGGGGTCCCTGAGACTCTCCTGTG |
| | | CAGCCTCCGGATTCACCTTTAGTAGCTATTGGAT |
| | | GAGCTGGGTCCGCCAGGCTCCAGGGAAGGGGCT |
| | | GGAGTGGGTGGCCAGCATAAAACAAGATGGAAG |
| | | TGAGAAATACTATGTGGACTCTGTGAAGGGCCGA |
| | | TTCACCATCTCCAGAGACAACGCCAGGAACTCAC |
| | | TGTATCTGCAAATGAACAGCCTGAGAGCCGAGG |
| | | ACACGGCTGTGTATTACTGTGCGAGAGATCTTGT |
| | | ATTAATGGTGTATGATATGGACTACTACTACTAC |
| | | GGTATGGACGTCTGGGGCCAAGGGACCACGGTC |
| | | ACCGTCTCCTCA |
| SS-15195 | 497 | GAGGTGCAGCTGGTGGAGTCTGGGGGAGGCTTG |
| | | GTCCAGCCTGGGGGGTCCCTGAGACTCTCCTGTG |
| | | CAGCCTCCGGATTCACCTTTAGTAGCTATTGGAT |
| | | GAGCTGGGTCCGCCAGGCTCCAGGGAAGGGGCT |
| | | GGAGTGGGTGGCCAGCATAAAACAAGATGGAAG |
| | | TGAGAAATACTATGTGGACTCTGTGAAGGGCCGA |
| | | TTCACCATCTCCAGAGACAACGCCAGGAACTCAC |
| | | TGTATCTGCAAATGAACAGCCTGAGAGCCGAGG |
| | | ACACGGCTGTGTATTACTGTGCGAGAGATCTTGT |
| | | ATTAATGGTGTATGATATGGACTACTACTACTAC |
| | | GGTATGGACGTCTGGGGCCAAGGGACCACGGTC |
| | | ACCGTCTCCTCA |
| SS-15196 | 498 | GAGGTGCAGCTGGTGGAGTCTGGGGGAGGCTTG |
| | | GTCCAGCCTGGGGGGTCCCTGAGACTCTCCTGTG |
| | | CAGCCTCCGGATTCACCTTTAGTAGCTATTGGAT |
| | | GAGCTGGGTCCGCCAGGCTCCAGGGAAGGGGCT |
| | | GGAGTGGGTGGCCAGCATAAAACAAGATGGAAG |
| | | TGAGAAATACTATGTGGACTCTGTGAAGGGCCGA |
| | | TTCACCATCTCCAGAGACAACGCCAGGAACTCAC |
| | | TGTATCTGCAAATGAACAGCCTGAGAGCCGAGG |
| | | ACACGGCTGTGTATTACTGTGCGAGAGATCTTGT |
| | | ATTAATGGTGTATGATATGGACTACTACTACTAC |
| | | GGTATGGACGTCTGGGGCCAAGGGACCACGGTC |
| | | ACCGTCTCCTCA |
| SS-14894 | 499 | GAGGTGCAGCTGGTGGAGTCTGGGGGAGGCTTG |
| | | GTCCAGCCTGGGGGGTCCCTGAGACTCTCCTGTG |
| | | CAGCCTCCGGATTCACCTTTAGTAGCTATTGGAT |
| | | GAGCTGGGTCCGCCAGGCTCCAGGGAAGGGGCT |
| | | GGAGTGGGTGGCCAGCATAAAACAAGATGGAAG |
| | | TGAGAAATACTATGTGGACTCTGTGAAGGGCCGA |
| | | TTCACCATCTCCAGAGACAACGCCAGGAACTCAC |
| | | TGTATCTGCAAATGAACAGCCTGAGAGCCGAGG |
| | | ACACGGCTGTGTATTACTGTGCGAGAGATCTTGT |
| | | ATTAATGGTGTATGATATGGACTACTACTACTAC |
| | | GGTATGGACGTCTGGGGCCAAGGGACCACGGTC |
| | | ACCGTCTCCTCA |
| SS-15504 | 500 | GAGGTGCAGCTGGTGGAGTCTGGGGGAGGCTTG |
| | | GTCCAGCCTGGGGGGTCCCTGAGACTCTCCTGTG |
| | | CAGCCTCCGGATTCACCTTTAGTAGCTATTGGAT |
| | | GAGCTGGGTCCGCCAGGCTCCAGGGAAGGGGCT |
| | | GGAGTGGGTGGCCAGCATAAAACAAGATGGAAG |
| | | TGAGAAATACTATGTGGACTCTGTGAAGGGCCGA |
| | | TTCACCATCTCCAGAGACAACGCCAGGAACTCAC |
| | | TGTATCTGCAAATGAACAGCCTGAGAGCCGAGG |
| | | ACACGGCTGTGTATTACTGTGCGAGAGATCTTGT |
| | | ATTATCGGTGTATGACATGGACTACTACTACTAC |
| | | GGTATGGACGTCTGGGGCCAAGGGACCACGGTC |
| | | ACCGTCTCCTCA |
| SS-15494 | 501 | GAGGTGCAGCTGGTGGAGTCTGGGGGAGGCTTG |
| | | GTCCAGCCTGGGGGGTCCCTGAGACTCTCCTGTG |
| | | CAGCCTCCGGATTCACCTTTAGTAGCTATTGGAT |
| | | GAGCTGGGTCCGCCAGGCTCCAGGGAAGGGGCT |
| | | GGAGTGGGTGGCCAGCATAAAACAAGATGGAAG |
| | | TGAGAAATACTATGTGGACTCTGTGAAGGGCCGA |
| | | TTCACCATCTCCAGAGACAACGCCAGGAACTCAC |
| | | TGTATCTGCAAATGAACAGCCTGAGAGCCGAGG |
| | | ACACGGCTGTGTATTACTGTGCGAGAGATCTTGT |
| | | ATTATTCGTGTATGACATGGACTACTACTACTAC |
| | | GGTATGGACGTCTGGGGCCAAGGGACCACGGTC |
| | | ACCGTCTCCTCA |
| SS-14892 | 502 | GAGGTGCAGCTGGTGGAGTCTGGGGGAGGCTTG |
| | | GTCCAGCCTGGGGGGTCCCTGAGACTCTCCTGTG |
| | | CAGCCTCCGGATTCACCTTTAGTAGCTATTGGAT |
| | | GAGCTGGGTCCGCCAGGCTCCAGGGAAGGGGCT |
| | | GGAGTGGGTGGCCAGCATAAAACAAGATGGAAG |
| | | TGAGAAATACTATGTGGACTCTGTGAAGGGCCGA |
| | | TTCACCATCTCCAGAGACAACGCCAGGAACTCAC |
| | | TGTATCTGCAAATGAACAGCCTGAGAGCCGAGG |
| | | ACACGGCTGTGTATTACTGTGCGAGAGATCTTGT |
| | | ATTAATGGTGTATGATATGGACTACTACTACTAC |
| | | GGTATGGACGTCTGGGGCCAAGGGACCACGGTC |
| | | ACCGTCTCCTCA |
| SS-15495 | 503 | GAGGTGCAGCTGGTGGAGTCTGGGGGAGGCTTG |
| | | GTCCAGCCTGGGGGGTCCCTGAGACTCTCCTGTG |
| | | CAGCCTCCGGATTCACCTTTAGTAGCTATTGGAT |
| | | GAGCTGGGTCCGCCAGGCTCCAGGGAAGGGGCT |
| | | GGAGTGGGTGGCCAGCATAAAACAAGATGGAAG |
| | | TGAGAAATACTATGTGGACTCTGTGAAGGGCCGA |
| | | TTCACCATCTCCAGAGACAACGCCAGGAACTCAC |
| | | TGTATCTGCAAATGAACAGCCTGAGAGCCGAGG |
| | | ACACGGCTGTGTATTACTGTGCGAGAGATCTTGT |
| | | ATTATTCGTGTATGACATGGACTACTACTACTAC |
| | | GGTATGGACGTCTGGGGCCAAGGGACCACGGTC |
| | | ACCGTCTCCTCA |
| SS-15496 | 504 | GAGGTGCAGCTGGTGGAGTCTGGGGGAGGCTTG |
| | | GTCCAGCCTGGGGGGTCCCTGAGACTCTCCTGTG |
| | | CAGCCTCCGGATTCACCTTTAGTAGCTATTGGAT |
| | | GAGCTGGGTCCGCCAGGCTCCAGGGAAGGGGCT |
| | | GGAGTGGGTGGCCAGCATAAAACAAGATGGAAG |
| | | TGAGAAATACTATGTGGACTCTGTGAAGGGCCGA |
| | | TTCACCATCTCCAGAGACAACGCCAGGAACTCAC |
| | | TGTATCTGCAAATGAACAGCCTGAGAGCCGAGG |
| | | ACACGGCTGTGTATTACTGTGCGAGAGATCTTGT |
| | | ATTAATGGTGTATGATATGGACTACTACTACTAC |
| | | GGTATGGACGTCTGGGGCCAAGGGACCACGGTC |
| | | ACCGTCTCCTCA |
| SS-15497 | 505 | GAGGTGCAGCTGGTGGAGTCTGGGGGAGGCTTG |
| | | GTCCAGCCTGGGGGGTCCCTGAGACTCTCCTGTG |
| | | CAGCCTCCGGATTCACCTTTAGTAGCTATTGGAT |
| | | GAGCTGGGTCCGCCAGGCTCCAGGGAAGGGGCT |
| | | GGAGTGGGTGGCCAGCATAAAACAAGATGGAAG |
| | | TGAGAAATACTATGTGGACTCTGTGAAGGGCCGA |
| | | TTCACCATCTCCAGAGACAACGCCAGGAACTCAC |
| | | TGTATCTGCAAATGAACAGCCTGAGAGCCGAGG |
| | | ACACGGCTGTGTATTACTGTGCGAGAGATCTTGT |
| | | ATTATCGGTGTATGACATGGACTACTACTACTAC |
| | | GGTATGGACGTCTGGGGCCAAGGGACCACGGTC |
| | | ACCGTCTCCTCA |
| SS-15503 | 506 | MDMRVPAQLLGLLLLWLRGARCDIVMTQSPL |
| | | SLPVTPGEPASISCRSSQSLLHSFGYNYLDWYL |
| | | QKPGQSPQLLIYLGLNRASGVPDRFSGSGSGTD |
| | | FTLKISRVEAEDVGVYYCMQALQTPLTFGGGT |
| | | KVEIKRTVAAPSVFIFPPSDEQLKSGTASVVCLL |
| | | NNFYPREAKVQWKVDNALQSGNSQESVILQD |
| | | SKDSTYSLSSTLTLSKADYEKHKVYACEVTHQ |
| | | GLSSPVTKSFNRGEC |
| SS-15505 | 507 | MDMRVPAQLLGLLLLWLRGARCDIVMTQSPL |
| | | SLPVTPGEPASISCRSSQSLLHSNGHNYLDWYL |
| | | QKPGQSPQLLIYLGLNRAHGVPDRFSGSGSGTD |
| | | FTLKISRVEAEDVGVYYCMQALQTPLTFGGGT |
| | | KVEIKRTVAAPSVFIFPPSDEQLKSGTASVVCLL |
| | | NNFYPREAKVQWKVDNALQSGNSQESVTEQD |
| | | SKDSTYSLSSTLTLSKADYEKHKVYACEVTHQ |
| | | GLSSPVTKSFNRGEC |
| SS-15506 | 508 | GAGGTGCAGCTGGTGGAGTCTGGGGGAGGCTTG |
| | | GTCCAGCCTGGGGGGTCCCTGAGACTCTCCTGTG |
| | | CAGCCTCCGGATTCACCTTTAGTAGCTATTGGAT |
| | | GAGCTGGGTCCGCCAGGCTCCAGGGAAGGGGCT |
| | | GGAGTGGGTGGCCAGCATAAAACAAGATGGAAG |
| | | TGAGAAATACTATGTGGACTCTGTGAAGGGCCGA |
| | | TTCACCATCTCCAGAGACAACGCCAGGAACTCAC |
| | | TGTATCTGCAAATGAACAGCCTGAGAGCCGAGG |
| | | ACACGGCTGTGTATTACTGTGCGAGAGATCTTGT |
| | | ATTAAACGTGTATGACATGGACTACTACTACTAC |
| | | GGTATGGACGTCTGGGGCCAAGGGACCACGGTC |
| | | ACCGTCTCCTCA |
| SS-15507 | 509 | GAGGTGCAGCTGGTGGAGTCTGGGGGAGGCTTG |
| | | GTCCAGCCTGGGGGGTCCCTGAGACTCTCCTGTG |
| | | CAGCCTCCGGATTCACCTTTAGTAGCTATTGGAT |
| | | GAGCTGGGTCCGCCAGGCTCCAGGGAAGGGGCT |
| | | GGAGTGGGTGGCCAGCATAAAACAAGATGGAAG |
| | | TGAGAAATACTATGTGGACTCTGTGAAGGGCCGA |
| | | TTCACCATCTCCAGAGACAACGCCAGGAACTCAC |
| | | TGTATCTGCAAATGAACAGCCTGAGAGCCGAGG |
| | | ACACGGCTGTGTATTACTGTGCGAGAGATCTTGT |
| | | ATTAATGGTGTATGATATAGACTACTACTACTAC |
| | | GGTATGGACGTCTGGGGCCAAGGGACCACGGTC |
| | | ACCGTCTCCTCA |
| SS-15502 | 510 | GAGGTGCAGCTGGTGGAGTCTGGGGGAGGCTTG |
| | | GTCCAGCCTGGGGGGTCCCTGAGACTCTCCTGTG |
| | | CAGCCTCCGGATTCACCTTTAGTAGCTATTGGAT |
| | | GAGCTGGGTCCGCCAGGCTCCAGGGAAGGGGCT |
| | | GGAGTGGGTGGCCAGCATAAAACAAGATGGAAG |
| | | TGAGAAATACTATGTGGACTCTGTGAAGGGCCGA |
| | | TTCACCATCTCCAGAGACAACGCCAGGAACTCAC |
| | | TGTATCTGCAAATGAACAGCCTGAGAGCCGAGG |
| | | ACACGGCTGTGTATTACTGTGCGAGAGATCTTGT |
| | | ATTAAACGTGTATGACATGGACTACTACTACTAC |
| | | GGTATGGACGTCTGGGGCCAAGGGACCACGGTC |
| | | ACCGTCTCCTCA |
| SS-15508 | 511 | GAGGTGCAGCTGGTGGAGTCTGGGGGAGGCTTG |
| | | GTCCAGCCTGGGGGGTCCCTGAGACTCTCCTGTG |
| | | CAGCCTCCGGATTCACCTTTAGTAGCTATTGGAT |
| | | GAGCTGGGTCCGCCAGGCTCCAGGGAAGGGGCT |
| | | GGAGTGGGTGGCCAGCATAAAACAAGATGGAAG |
| | | TGAGAAATACTATGTGGACTCTGTGAAGGGCCGA |
| | | TTCACCATCTCCAGAGACAACGCCAGGAACTCAC |
| | | TGTATCTGCAAATGAACAGCCTGAGAGCCGAGG |
| | | ACACGGCTGTGTATTACTGTGCGAGAGATCTTGT |
| | | ATTAATGGTGTATGATATAGACTACTACTACTAC |
| | | GGTATGGACGTCTGGGGCCAAGGGACCACGGTC |
| | | ACCGTCTCCTCA |
| SS-15501 | 512 | GAGGTGCAGCTGGTGGAGTCTGGGGGAGGCTTG |
| | | GTCCAGCCTGGGGGGTCCCTGAGACTCTCCTGTG |
| | | CAGCCTCCGGATTCACCTTTAGTAGCTATTGGAT |
| | | GAGCTGGGTCCGCCAGGCTCCAGGGAAGGGGCT |
| | | GGAGTGGGTGGCCAGCATAAAACAAGATGGAAG |
| | | TGAGAAATACTATGTGGACTCTGTGAAGGGCCGA |
| | | TTCACCATCTCCAGAGACAACGCCAGGAACTCAC |
| | | TGTATCTGCAAATGAACAGCCTGAGAGCCGAGG |
| | | ACACGGCTGTGTATTACTGTGCGAGAGATCTTGT |
| | | ATTATCGGTGTATGACATGGACTACTACTACTAC |
| | | GGTATGGACGTCTGGGGCCAAGGGACCACGGTC |
| | | ACCGTCTCCTCA |
| SS-15500 | 513 | GAGGTGCAGCTGGTGGAGTCTGGGGGAGGCTTG |
| | | GTCCAGCCTGGGGGGTCCCTGAGACTCTCCTGTG |
| | | CAGCCTCCGGATTCACCTTTAGTAGCTATTGGAT |
| | | GAGCTGGGTCCGCCAGGCTCCAGGGAAGGGGCT |
| | | GGAGTGGGTGGCCAGCATAAAACAAGATGGAAG |
| | | TGAGAAATACTATGTGGACTCTGTGAAGGGCCGA |
| | | TTCACCATCTCCAGAGACAACGCCAGGAACTCAC |
| | | TGTATCTGCAAATGAACAGCCTGAGAGCCGAGG |
| | | ACACGGCTGTGTATTACTGTGCGAGAGATCTTGT |
| | | ATTAAACGTGTATGACATGGACTACTACTACTAC |
| | | GGTATGGACGTCTGGGGCCAAGGGACCACGGTC |
| | | ACCGTCTCCTCA |
| SS-15003 | 514 | GAGGTGCACCTGGTGGAGTCTGGGGGAGGCGTG |
| | | GTCCAGCCTGGGAGGTCCCTGAGACTCTCCTGTG |
| | | CAGCGTCTGGATTCACCTTCAACAGCTTTGGCAT |
| | | GCACTGGGTCCGCCAGGCTCCAGGCAAGGGGCT |
| | | GGAGTGGGTGGCACTTATCTGGTCTGATGGAAGT |
| | | GATGAATACTATGCAGACTCCGTGAAGGGCCGAT |
| | | TCACCATCTCCAGAGACAATTCCAAGAACACGCT |
| | | GTATCTGCAAATGAACAGCCTGAGAGCCGAGGA |
| | | CACGGCTGTGTATTACTGTGCGAGAGCCATAGCA |
| | | GCCCTCTACTACTACTACGGTATGGACGTCTGGG |
| | | GCCAAGGGACCACGGTCACCGTCTCCTCA |
| SS-15005 | 515 | GAGGTGCAGCTGTTGGAGTCTGGGGGAGGCTTGG |
| | | TACAGCCAGGTGGATCCCTGAGACTCTCCTGTGC |
| | | AGCCTCTGGATTCACCTTTAGCAGCTATGCCATG |
| | | AACTGGGTCCGCCAGGCTCCAGGGAAGGGGCTG |
| | | GAGTGGGTCTCAACTATTAGTGGTAGTGGTGGTA |
| | | ACACATACTACGCAGACTCCGTGAAGGGCCGGTT |
| | | CACCATCTCCAGAGACAATTCCAAGAACACGCTG |
| | | TATCTGCAAATGAACAGCCTGAGAGCCGAGGAC |
| | | ACGGCCGTATATTACTGTGCGAAAAAGTTTGTAC |
| | | TAATGGTGTATGCTATGCTTGACTACTGGGGCCA |
| | | GGGAACCCTGGTCACCGTCTCCTCA |
| SS-15757 | 516 | GAGGTGCAGCTGGTGGAGTCTGGGGGAGGCTTG |
| (P1F4) | | GTCCAGCCTGGGGGGTCCCTGAGACTCTCCTGTG |
| | | CAGCCTCCGGATTCACCTTTAGTAGCTATTGGAT |
| | | GAGCTGGGTCCGCCAGGCTCCAGGGAAGGGGCT |
| | | GGAGTGGGTGGCCAGCATAAAACAAGATGGAAG |
| | | TGAGAAATACTATGTGGACTCTGTGAAGGGCCGA |
| | | TTCACCATCTCCAGAGACAACGCCAGGAACTCAC |
| | | TGTATCTGCAAATGAACAGCCTGAGAGCCGAGG |
| | | ACACGGCTGTGTATTACTGTGCGAGAGATCTTGT |
| | | ATTAATGGTGTATGATATAGACTACTACTACTAC |
| | | GGTATGGACGTCTGGGGCCAAGGGACCACGGTC |
| | | ACCGTCTCCTCA |
| SS-15758 | 517 | GAGGTGCAGCTGGTGGAGTCTGGGGGAGGCTTG |
| (P1B6) | | GTCCAGCCTGGGGGGTCCCTGAGACTCTCCTGTG |
| | | CAGCCTCCGGATTCACCTTTAGTAGCTATTGGAT |
| | | GAGCTGGGTCCGCCAGGCTCCAGGGAAGGGGCT |
| | | GGAGTGGGTGGCCAGCATAAAACAAGATGGAAG |
| | | TGAGAAATACTATGTGGACTCTGTGAAGGGCCGA |
| | | TTCACCATCTCCAGAGACAACGCCAGGAACTCAC |
| | | TGTATCTGCAAATGAACAGCCTGAGAGCCGAGG |
| | | ACACGGCTGTGTATTACTGTGCGAGAGATCTTGT |
| | | ATTAATGGTGTATGATCTGGACTACTACTACTAC |
| | | GGTATGGACGTCTGGGGCCAAGGGACCACGGTC |
| | | ACCGTCTCCTCA |
| SS-15759 | 518 | GAGGTGCAGCTGGTGGAGTCTGGGGGAGGCTTG |
| (P2F4) | | GTCCAGCCTGGGGGGTCCCTGAGACTCTCCTGTG |
| | | CAGCCTCCGGATTCACCTTTAGTAGCTATTGGAT |
| | | GAGCTGGGTCCGCCAGGCTCCAGGGAAGGGGCT |
| | | GGAGTGGGTGGCCAGCATAAAACAAGATGGAAG |
| | | TGAGAAATACTATGTGGACTCTGTGAAGGGCCGA |
| | | TTCACCATCTCCAGAGACAACGCCAGGAACTCAC |
| | | TGTATCTGCAAATGAACAGCCTGAGAGCCGAGG |
| | | ACACGGCTGTGTATTACTGTGCGAGAGATCTTGT |
| | | ATTAATGGTGTATGATATGGACTACTACTACTAC |
| | | GGTATGGACGTCTGGGGCCAAGGGACCACGGTC |
| | | ACCGTCTCCTCA |
| SS-15761 | 519 | GAGGTGCAGCTGGTGGAGTCTGGGGGAGGCTTG |
| (P2G5) | | GTCCAGCCTGGGGGGTCCCTGAGACTCTCCTGTG |
| | | CAGCCTCCGGATTCACCTTTAGTAGCTATTGGAT |
| | | GAGCTGGGTCCGCCAGGCTCCAGGGAAGGGGCT |
| | | GGAGTGGGTGGCCAGCATAAAACAAGATGGAAG |
| | | TGAGAAATACTATGTGGACTCTGTGAAGGGCCGA |
| | | TTCACCATCTCCAGAGACAACGCCAGGAACTCAC |
| | | TGTATCTGCAAATGAACAGCCTGAGAGCCGAGG |
| | | ACACGGCTGTGTATTACTGTGCGAGAGATCTTGT |
| | | ATTAATGGTGTATGATATGGACTACTACTACTAC |
| | | GGTATGGACGTCTGGGGCCAAGGGACCACGGTC |
| | | ACCGTCTCCTCA |
| SS-15763 | 520 | GAGGTGCAGCTGGTGGAGTCTGGGGGAGGCTTG |
| (P2H7) | | GTCCAGCCTGGGGGGTCCCTGAGACTCTCCTGTG |
| | | CAGCCTCCGGATTCACCTTTAGTAGCTATTGGAT |
| | | GAGCTGGGTCCGCCAGGCTCCAGGGAAGGGGCT |
| | | GGAGTGGGTGGCCAGCATAAAACAAGATGGAAG |
| | | TGAGAAATACTATGTGGACTCTGTGAAGGGCCGA |
| | | TTCACCATCTCCAGAGACAACGCCAGGAACTCAC |
| | | TGTATCTGCAAATGAACAGCCTGAGAGCCGAGG |
| | | ACACGGCTGTGTATTACTGTGCGAGAGATCTTGT |
| | | ATTAATGGTGTATGATATGGACTACTACTACTAC |
| | | GGTATGGACGTCTGGGGCCAAGGGACCACGGTC |
| | | ACCGTCTCCTCA |
| SS-15764 | 521 | GAGGTGCAGCTGGTGGAGTCTGGGGGAGGCTTG |
| (P2H8) | | GTCCAGCCTGGGGGGTCCCTGAGACTCTCCTGTG |
| | | CAGCCTCCGGATTCACCTTTAGTAGCTATTGGAT |
| | | GAGCTGGGTCCGCCAGGCTCCAGGGAAGGGGCT |
| | | GGAGTGGGTGGCCAGCATAAAACAAGATGGAAG |
| | | TGAGAAATACTATGTGGACTCTGTGAAGGGCCGA |
| | | TTCACCATCTCCAGAGACAACGCCAGGAACTCAC |
| | | TGTATCTGCAAATGAACAGCCTGAGAGCCGAGG |
| | | ACACGGCTGTGTATTACTGTGCGAGAGATCTTGT |
| | | ATTAATGGTGTATGATATGGACTACTACTACTAC |
| | | GGTATGGACGTCTGGGGCCAAGGGACCACGGTC |
| | | ACCGTCTCCTCA |

[0106] Each of the heavy chain variable regions listed in Table 2B can be combined with any of the light chain variable regions shown in Table 2A to form an antigen binding protein.

[0107] In some instances, the antigen binding protein includes at least one heavy chain variable region and/or one light chain variable region from those listed in Tables 2A and 2B. In some instances, the antigen binding protein includes at least two different heavy chain variable regions and/or light chain variable regions from those listed in Table 2A and 2B.

[0108] The various combinations of heavy chain variable regions can be combined with any of the various combinations of light chain variable regions.

[0109] In other embodiments, an antigen binding protein comprises two identical light chain variable regions and/or two identical heavy chain variable regions. As an example, the antigen binding protein can be an antibody or immunologically functional fragment thereof that includes two light chain variable regions and two heavy chain variable regions in combinations of pairs of light chain variable regions and pairs of heavy chain variable regions as listed in Tables 2A and 2B.

[0110] In some instances, the antigen binding proteins in the above pairings can comprise amino acid sequences that have 70%, 75%, 80%, 85%, 90%, 95%, 96%, 97%, 98% or 99% sequence identity with the specified variable domains described in Tables 2A and 2B.

[0111] Still other antigen binding proteins, e.g., antibodies or immunologically functional fragments, include variant forms of a variant heavy chain and a variant light chain as just described.

### Antigen Binding Protein CDRs

[0112] In various embodiments, the antigen binding proteins disclosed herein can comprise polypeptides into which one or more CDRs are grafted, inserted and/or joined. An antigen binding protein can have 1, 2, 3, 4, 5 or 6 CDRs. An antigen binding protein thus can have, for example, one heavy chain CDR1 (“CDRH1”), and/or one heavy chain CDR2 (“CDRH2”), and/or one heavy chain CDR3 (“CDRH3”), and/or one light chain CDR1 (“CDRL1”), and/or one light chain CDR2 (“CDRL2”), and/or one light chain CDR3 (“CDRL3”). Some antigen binding proteins include both a CDRH3 and a CDRL3. Specific heavy and light chain CDRs are identified in Tables 3A and 3B, respectively, infra.

[0113] Complementarity determining regions (CDRs) and framework regions (FR) of a given antibody are herein identified using the system described by Kabat et al., (1991) “Sequences of Proteins of Immunological Interest”, 5^{th} Ed., US Dept. of Health and Human Services, PHS, NIH, NIH Publication no. 91-3242. Certain antibodies that are disclosed herein comprise one or more amino acid sequences that are identical or have substantial sequence identity to the amino acid sequences of one or more of the CDRs presented in Table 3A (CDRHs) and Table 3B (CDRLs), infra.

TABLE 3A
Exemplary CDRH Sequences

| | SEQ | | SEQ | | SEQ | |
|---|---|---|---|---|---|---|
| | ID | | ID | | ID | |
| Ab ID | NO: | CDRH1 | NO: | CDRH2 | NO: | CDRH3 |
| SS-13406 | 522 | SYWMS | 523 | SIKQDGSE | 524 | DLVLMVY |
| (8A3HLE-51) | | | | KYYVDSV | | DIDYYYY |
| | | | | KG | | GMDV |
| SS-13407 | 525 | SYWMS | 526 | SIKQDGSE | 527 | DLVLMVY |
| (8A3HLE-112) | | | | KYYVDSV | | DIDYYYY |
| | | | | KG | | GMDV |
| SS-14888 | 528 | SYWMS | 529 | SIKQDGSE | 530 | DLVLMVY |
| (P2C6- | | | | KYYVDSV | | DMDYYY |
| HLE51) | | | | KG | | YGMDV |
| 13G9 | 531 | SYGIS | 532 | WISVYKG | 533 | NYQIFSFDY |
| | | | | NTNYAQK | | |
| | | | | LQG | | |
| 19A12 | 534 | SYGMH | 535 | VIWYDGS | 536 | DRGLD |
| | | | | NKYYADS | | |
| | | | | VKG | | |
| 20D12 | 537 | AYYWN | 538 | EINHSGRT | 539 | GQLVPFDY |
| | | | | DYNPSLKS | | |
| 25B5 | 540 | SYGIS | 541 | WISFYNG | 542 | GYGMDV |
| | | | | NTNYAQK | | |
| | | | | VQG | | |
| 30G7 | 543 | SYGIS | 544 | WISVYNG | 545 | GYGMDV |
| | | | | NTNYAQK | | |
| | | | | VQG | | |
| SS-15057 | 546 | SYSMN | 547 | SISSSSSYI | 548 | DYDFHSA |
| | | | | SYADSVKG | | YYDAFDV |
| 15058 | 549 | SHSMN | 550 | SISSSSSYI | 551 | DYDFHSA |
| | | | | SYADSVKG | | YYDAFDV |
| 15059 | 552 | SYSMN | 553 | SISSHSSYI | 554 | DYDFHSA |
| | | | | SYADSVKG | | YYDAFDV |
| 15065 | 555 | SYSMN | 556 | SISSSSSYI | 557 | DYDFHSA |
| | | | | SYADSVKG | | HYDAFDV |
| 15079 | 558 | SYSMN | 559 | SISSSSSYI | 560 | DYDFHSA |
| | | | | SYADSVKG | | YYDAFDV |
| 15080 | 561 | SHSMN | 562 | SISSSSSYI | 563 | DYDFHSA |
| | | | | SYADSVKG | | YYDAFDV |
| 15087 | 564 | SYSMN | 565 | SISSSSSYI | 566 | DYDFHSA |
| | | | | SYADSVKG | | HYDAFDV |
| 15101 | 567 | SYSMN | 568 | STSSSSHYI | 569 | DYDFHSA |
| | | | | SYADSVKG | | YYDAFDV |
| 15103 | 570 | SYSMN | 571 | SISSSSSYI | 572 | DYDFHSA |
| | | | | SHADSVKG | | YYDAFDV |
| 15104 | 573 | SYSMN | 574 | SISSSSSYI | 575 | DYDFHSA |
| | | | | SYAHSVKG | | YYDAFDV |
| 15105 | 576 | SYSMN | 577 | SISSSSSYI | 578 | DYDFHSA |
| | | | | SYADHVKG | | YYDAFDV |
| 15106 | 579 | SYSMN | 580 | SISSSSSYI | 581 | DYDFHSA |
| | | | | SYADSVKG | | HYDAFDV |
| 15108 | 582 | SHSMN | 583 | SISSHSSYI | 584 | DYDFHSA |
| | | | | SYADSVKG | | YYDAFDV |
| 15112 | 585 | SHSMN | 586 | SISSSSSYI | 587 | DYDFHSA |
| | | | | SYAHSVKG | | YYDAFDV |
| 15113 | 588 | SHSMN | 589 | SISSSSSYI | 590 | DYDFHSA |
| | | | | SYADHVKG | | YYDAFDV |
| 15114 | 591 | SHSMN | 592 | SISSSSSYI | 593 | DYDFHSA |
| | | | | SYADSVKG | | HYDAFDV |
| 15117 | 594 | SYSMN | 595 | SISSHSSY | 596 | DYDFHSA |
| | | | | HSYADSV | | YYDAFDV |
| | | | | KG | | |
| 15121 | 597 | SYSMN | 598 | SISSHSSYI | 599 | DYDFHSA |
| | | | | SYADSVKG | | HYDAFDV |
| 15123 | 600 | SYSMN | 601 | SISSSSHY | 602 | DYDFHSA |
| | | | | HSYADSV | | YYDAFDV |
| | | | | KG | | |
| 15124 | 603 | SYSMN | 604 | SISSSSHYI | 605 | DYDFHSA |
| | | | | SHADSVKG | | YYDAFDV |
| 15126 | 606 | SYSMN | 607 | SISSSSHYI | 608 | DYDFHSA |
| | | | | SYADHVKG | | YYDAFDV |
| 15132 | 609 | SYSMN | 610 | SISSSSSYH | 611 | DYDFHSA |
| | | | | SYADSVKG | | HYDAFDV |
| 15133 | 612 | SYSMN | 613 | SISSSSSYH | 614 | DYDFHSA |
| | | | | SYADSVKG | | YHDAFDV |
| 15136 | 615 | SYSMN | 616 | SISSSSSYI | 617 | DYDFHSA |
| | | | | SHADSVKG | | HYDAFDV |
| 15139 | 618 | SYSMN | 619 | SISSSSSYI | 620 | DYDFHSA |
| | | | | SYAHSVKG | | HYDAFDV |
| 15140 | 621 | SYSMN | 622 | SISSSSSYI | 623 | DYDFHSA |
| | | | | SYAHSVKG | | YHDAFDV |
| 15141 | 624 | SYSMN | 625 | SISSSSSYI | 626 | DYDFHSA |
| | | | | SYADHVKG | | HYDAFDV |
| SS-13983 | 627 | SYWMS | 628 | SIKQDGSE | 629 | DLVLMVY |
| A01 | | | | KYYVDSV | | DIDYYYY |
| | | | | KG | | GMDV |
| SS-13991 | 630 | SYWMS | 631 | SIKQDGSE | 632 | DLVLMVY |
| A02 | | | | KYYVDSV | | DIDYYYY |
| | | | | KG | | GMDV |
| SS-13993 | 633 | SYWMS | 634 | SIKQDGSE | 635 | DLVLMVY |
| C02 | | | | KYYVDSV | | DIDYYYY |
| | | | | KG | | GMDV |
| SS-12685 | 636 | SYWMS | 637 | SIKQDGSE | 638 | DLVLMVY |
| P1B1 | | | | KYYVDSV | | DMDYYY |
| | | | | KG | | YGMDV |
| SS-12686 | 639 | SYWMS | 640 | SIKQDGSE | 641 | DLVLMVY |
| P2F5 | | | | KYYVDSV | | DMDYYY |
| | | | | KG | | YGMDV |
| SS-12687 | 642 | SYWMS | 643 | SIKQDGSE | 644 | DLVLMVY |
| P2C6 | | | | KYYVDSV | | DMDYYY |
| | | | | KG | | YGMDV |
| SS-14892 | 645 | SYWMS | 646 | SIKQDGSE | 647 | DLVLMVY |
| P2F5/P2C6 | | | | KYYVDSV | | DMDYYY |
| | | | | KG | | YGMDV |
| SS-15509 | 648 | SYWMS | 649 | SIKQDGSE | 650 | DLVLFVY |
| | | | | KYYVDSV | | DMDYYY |
| | | | | KG | | YGMDV |
| SS-15510 | 651 | SYWMS | 652 | SIKQDGSE | 653 | DLVLFVY |
| | | | | KYYVDSV | | DMDYYY |
| | | | | KG | | YGMDV |
| SS-15511 | 654 | SYWMS | 655 | SIKQDGSE | 656 | DLVLFVY |
| | | | | KYYVDSV | | DMDYYY |
| | | | | KG | | YGMDV |
| SS-15512 | 657 | SYWMS | 658 | SIKQDGSE | 659 | DLVLFVY |
| | | | | KYYVDSV | | DMDYYY |
| | | | | KG | | YGMDV |
| SS-15513 | 660 | SYWMS | 661 | SIKQDGSE | 662 | DLVLFVY |
| | | | | KYYVDSV | | DMDYYY |
| | | | | KG | | YGMDV |
| SS-15514 | 663 | SYWMS | 664 | SIKQDGSE | 665 | DLVLFVY |
| | | | | KYYVDSV | | DMDYYY |
| | | | | KG | | YGMDV |
| SS-15497 | 666 | SYWMS | 667 | SIKQDGSE | 668 | DLVLSVY |
| | | | | KYYVDSV | | DMDYYY |
| | | | | KG | | YGMDV |
| SS-15515 | 669 | SYWMS | 670 | SIKQDGSE | 671 | DLVLSVY |
| | | | | KYYVDSV | | DMDYYY |
| | | | | KG | | YGMDV |
| SS-15516 | 672 | SYWMS | 673 | SIKQDGSE | 674 | DLVLSVY |
| | | | | KYYVDSV | | DMDYYY |
| | | | | KG | | YGMDV |
| SS-15517 | 675 | SYWMS | 676 | SIKQDGSE | 677 | DLVLSVY |
| | | | | KYYVDSV | | DMDYYY |
| | | | | KG | | YGMDV |
| SS-15518 | 678 | SYWMS | 679 | SIKQDGSE | 680 | DLVLSVY |
| | | | | KYYVDSV | | DMDYYY |
| | | | | KG | | YGMDV |
| SS-15519 | 681 | SYWMS | 682 | SIKQDGSE | 683 | DLVLSVY |
| | | | | KYYVDSV | | DMDYYY |
| | | | | KG | | YGMDV |
| SS-15520 | 684 | SYWMS | 685 | SIKQDGSE | 686 | DLVLSVY |
| | | | | KYYVDSV | | DMDYYY |
| | | | | KG | | YGMDV |
| SS-15522 | 687 | SYWMS | 688 | SIKQDGSE | 689 | DLVLSVY |
| | | | | KYYVDSV | | DMDYYY |
| | | | | KG | | YGMDV |
| SS-15524 | 690 | SYWMS | 691 | SIKQDGSE | 692 | DLVLFVY |
| | | | | KYYVDSV | | DMDYYY |
| | | | | KG | | YGMDV |
| SS-14835 | 693 | SYWMS | 694 | SIKQDGSE | 695 | DLVLMVY |
| | | | | KYYVDSV | | DIDYYYY |
| | | | | KG | | GMDV |
| SS-15194 | 696 | SYWMS | 697 | SIKQDGSE | 698 | DLVLMVY |
| | | | | KYYVDSV | | DMDYYY |
| | | | | KG | | YGMDV |
| SS-15195 | 699 | SYWMS | 700 | SIKQDGSE | 701 | DLVLMVY |
| | | | | KYYVDSV | | DMDYYY |
| | | | | KG | | YGMDV |
| SS-15196 | 702 | SYWMS | 703 | SIKQDGSE | 704 | DLVLMVY |
| | | | | KYYVDSV | | DMDYYY |
| | | | | KG | | YGMDV |
| SS-14894 | 705 | SYWMS | 706 | SIKQDGSE | 707 | DLVLMVY |
| | | | | KYYVDSV | | DMDYYY |
| | | | | KG | | YGMDV |
| SS-15504 | 708 | SYWMS | 709 | SIKQDGSE | 710 | DLVLSVY |
| | | | | KYYVDSV | | DMDYYY |
| | | | | KG | | YGMDV |
| SS-15494 | 711 | SYWMS | 712 | SIKQDGSE | 713 | DLVLFVY |
| | | | | KYYVDSV | | DMDYYY |
| | | | | KG | | YGMDV |
| SS-14892 | 714 | SYWMS | 715 | SIKQDGSE | 716 | DLVLMVY |
| | | | | KYYVDSV | | DMDYYY |
| | | | | KG | | YGMDV |
| SS-15495 | 717 | SYWMS | 718 | SIKQDGSE | 719 | DLVLFVY |
| | | | | KYYVDSV | | DMDYYY |
| | | | | KG | | YGMDV |
| SS-15496 | 720 | SYWMS | 721 | SIKQDGSE | 722 | DLVLMVY |
| | | | | KYYVDSV | | DMDYYY |
| | | | | KG | | YGMDV |
| SS-15497 | 723 | SYWMS | 724 | SIKQDGSE | 725 | DLVLSVY |
| | | | | KYYVDSV | | DMDYYY |
| | | | | KG | | YGMDV |
| SS-15503 | 726 | SYWMS | 727 | SIKQDGSE | 728 | DLVLSVY |
| | | | | KYYVDSV | | DMDYYY |
| | | | | KG | | YGMDV |
| SS-15505 | 729 | SYWMS | 730 | SIKQDGSE | 731 | DLVLFVY |
| | | | | KYYVDSV | | DMDYYY |
| | | | | KG | | YGMDV |
| SS-15506 | 732 | SYWMS | 733 | SIKQDGSE | 734 | DLVLNVY |
| | | | | KYYVDSV | | DMDYYY |
| | | | | KG | | YGMDV |
| SS-15507 | 735 | SYWMS | 736 | SIKQDGSE | 737 | DLVLMVY |
| | | | | KYYVDSV | | DIDYYYY |
| | | | | KG | | GMDV |
| SS-15502 | 738 | SYWMS | 739 | SIKQDGSE | 740 | DLVLNVY |
| | | | | KYYVDSV | | DMDYYY |
| | | | | KG | | YGMDV |
| SS-15508 | 741 | SYWMS | 742 | SIKQDGSE | 743 | DLVLMVY |
| | | | | KYYVDSV | | DIDYYYY |
| | | | | KG | | GMDV |
| SS-15501 | 744 | SYWMS | 745 | SIKQDGSE | 746 | DLVLSVY |
| | | | | KYYVDSV | | DMDYYY |
| | | | | KG | | YGMDV |
| SS-15500 | 747 | SYWMS | 748 | SIKQDGSE | 749 | DLVLNVY |
| | | | | KYYVDSV | | DMDYYY |
| | | | | KG | | YGMDV |
| SS-15003 | 750 | SFGMH | 751 | LIWSDGSD | 752 | AIAALYY |
| | | | | EYYADSV | | YYGMDV |
| | | | | KG | | |
| SS-15005 | 753 | SYAMN | 754 | TISGSGGN | 755 | KFVLMVY |
| | | | | TYYADSV | | AMLDY |
| | | | | KG | | |
| SS-15757 | 756 | SYWMS | 757 | SIKQDGSE | 758 | DLVLMVY |
| (P1F4) | | | | KYYVDSV | | DIDYYYY |
| | | | | KG | | GMDV |
| SS-15758 | 759 | SYWMS | 760 | SIKQDGSE | 761 | DLVLMVY |
| (P1B6) | | | | KYYVDSV | | DLDYYYY |
| | | | | KG | | GMDV |
| SS-15759 | 762 | SYWMS | 763 | SIKQDGSE | 764 | DLVLMVY |
| (P2F4) | | | | KYYVDSV | | DMDYYY |
| | | | | KG | | YGMDV |
| SS-15761 | 765 | SYWMS | 766 | SIKQDGSE | 767 | DLVLMVY |
| (P2G5) | | | | KYYVDSV | | DMDYYY |
| | | | | KG | | YGMDV |
| SS-15763 | 768 | SYWMS | 769 | SIKQDGSE | 770 | DLVLMVY |
| (P2H7) | | | | KYYVDSV | | DMDYYY |
| | | | | KG | | YGMDV |
| SS-15764 | 771 | SYWMS | 772 | SIKQDGSE | 773 | DLVLMVY |
| (P2H8) | | | | KYYVDSV | | DMDYYY |
| | | | | KG | | YGMDV |

TABLE 3B
Exemplary CDRL Sequences

| | SEQ ID | | SEQ ID | | SEQ ID | |
|---|---|---|---|---|---|---|
| Ab ID | NO: | CDRL1 | NO: | CDRL2 | NO: | CDRL3 |
| SS-13406 | 774 | RSSQSLLHS | 775 | LGSNRAS | 776 | MQALQTPLT |
| (8A3HLE- | | NGYNYLD | | | | |
| 51) | | | | | | |
| SS-13407 | 777 | RSSQSLLHS | 778 | LGSNRAS | 779 | MQALQTPLT |
| (8A3HLE- | | NGYNYLD | | | | |
| 112) | | | | | | |
| SS-14888 | 780 | RSSQSLLHS | 781 | LGLNRAS | 782 | MQALQTPLT |
| (P2C6- | | NGYNYLD | | | | |
| HLE51) | | | | | | |
| 13C9 | 783 | TGSRSNIGA | 784 | GNSNRPS | 785 | QSYDSNLS |
| | | GYDVN | | | | GSV |
| 19A12 | 786 | KSSQNVLY | 787 | WASTRES | 788 | HQYYSTPWT |
| | | SSSNKNYLV | | | | |
| 20D12 | 789 | SGSNSNIGS | 790 | SNNQRPS | 791 | AAWDDSLN |
| | | NTVN | | | | GWV |
| 25B5 | 792 | TGTSSDVG | 793 | EVSNRPS | 794 | SSYTSTSMV |
| | | GYNSVS | | | | |
| 30G7 | 795 | TGTSSDVG | 796 | EVSNRPS | 797 | SSYTSTSMV |
| | | GYNSVS | | | | |
| SS-15057 | 798 | TGSSSNIGA | 799 | GNSNRPS | 800 | QSYDSSLSG |
| | | GHDVH | | | | SV |
| 15058 | 801 | TGSSSNIGA | 802 | GNSNRPS | 803 | QSYDSSLSG |
| | | GHDVH | | | | SV |
| 15059 | 804 | TGSSSNIGA | 805 | GNSNRPS | 806 | QSYDSSLSG |
| | | GHDVH | | | | SV |
| 15065 | 807 | TGSSSNIGA | 808 | GNSNRPS | 809 | QSYDSSLSG |
| | | GHDVH | | | | SV |
| 15079 | 810 | TGSSSNIGA | 811 | GNSNRPS | 812 | QSYDSSLH |
| | | GYDVH | | | | GSV |
| 15080 | 813 | TGSSSNIGA | 814 | GNSNRPS | 815 | QSYDSSLH |
| | | GYDVH | | | | GSV |
| 15087 | 816 | TGSSSNIGA | 817 | GNSNRPS | 818 | QSYDSSLH |
| | | GYDVH | | | | GSV |
| 15101 | 819 | TGSSSNIGA | 820 | GNSNRPS | 821 | QSYDSSLSG |
| | | GYDVH | | | | SV |
| 15103 | 822 | TGSSSNIGA | 823 | GNSNRPS | 824 | QSYDSSLSG |
| | | GYDVH | | | | SV |
| 15104 | 825 | TGSSSNIGA | 826 | GNSNRPS | 827 | QSYDSSLSG |
| | | GYDVH | | | | SV |
| 15105 | 828 | TGSSSNIGA | 829 | GNSNRPS | 830 | QSYDSSLSG |
| | | GYDVH | | | | SV |
| 15106 | 831 | TGSSSNIGA | 832 | GNSNRPS | 833 | QSYDSSLSG |
| | | GYDVH | | | | SV |
| 15108 | 834 | TGSSSNIGA | 835 | GNSNRPS | 836 | QSYDSSLSG |
| | | GYDVH | | | | SV |
| 15112 | 837 | TGSSSNIGA | 838 | GNSNRPS | 839 | QSYDSSLSG |
| | | GYDVH | | | | SV |
| 15113 | 840 | TGSSSNIGA | 841 | GNSNRPS | 842 | QSYDSSLSG |
| | | GYDVH | | | | SV |
| 15114 | 843 | TGSSSNIGA | 844 | GNSNRPS | 845 | QSYDSSLSG |
| | | GYDVH | | | | SV |
| 15117 | 846 | TGSSSNIGA | 847 | GNSNRPS | 848 | QSYDSSLSG |
| | | GYDVH | | | | SV |
| 15121 | 849 | TGSSSNIGA | 850 | GNSNRPS | 851 | QSYDSSLSG |
| | | GYDVH | | | | SV |
| 15123 | 852 | TGSSSNIGA | 853 | GNSNRPS | 854 | QSYDSSLSG |
| | | GYDVH | | | | SV |
| 15124 | 855 | TGSSSNIGA | 856 | GNSNRPS | 857 | QSYDSSLSG |
| | | GYDVH | | | | SV |
| 15126 | 858 | TGSSSNIGA | 859 | GNSNRPS | 860 | QSYDSSLSG |
| | | GYDVH | | | | SV |
| 15132 | 861 | TGSSSNIGA | 862 | GNSNRPS | 863 | QSYDSSLSG |
| | | GYDVH | | | | SV |
| 15133 | 864 | TGSSSNIGA | 865 | GNSNRPS | 866 | QSYDSSLSG |
| | | GYDVH | | | | SV |
| 15136 | 867 | TGSSSNIGA | 868 | GNSNRPS | 869 | QSYDSSLSG |
| | | GYDVH | | | | SV |
| 15139 | 870 | TGSSSNIGA | 871 | GNSNRPS | 872 | QSYDSSLSG |
| | | GYDVH | | | | SV |
| 15140 | 873 | TGSSSNIGA | 874 | GNSNRPS | 875 | QSYDSSLSG |
| | | GYDVH | | | | SV |
| 15141 | 876 | TGSSSNIGA | 877 | GNSNRPS | 878 | QSYDSSLSG |
| | | GYDVH | | | | SV |
| SS-13983 | 879 | RSSQSLLHS | 880 | LGLNRAS | 881 | MQALQTPLT |
| A01 | | NGHNYLD | | | | |
| SS-13991 | 882 | RSSQSLLHS | 883 | LGLNRAH | 884 | MQALQTPLT |
| A02 | | NGHNYLD | | | | |
| SS-13993 | 885 | RSSQSLLHS | 886 | LGLNRAS | 887 | MQALQTPLT |
| C02 | | NGHNYLD | | | | |
| SS-12685 | 888 | RSSQSLLHS | 889 | LGSNRAS | 890 | MQALQTPLT |
| P1B1 | | YGYNYLD | | | | |
| SS-12686 | 891 | RSSQSLLHS | 892 | LGSNRAS | 893 | MQALQTPLT |
| P2F5 | | FGYNYLD | | | | |
| SS-12687 | 894 | RSSQSLLHS | 895 | LGLNRAS | 896 | MQALQTPLT |
| P2C6 | | NGYNYLD | | | | |
| SS-14982 | 897 | RSSQSLLHS | 898 | LGLNRAS | 899 | MQALQTPLT |
| P2F5/P2C6 | | FGYNYLD | | | | |
| SS-15509 | 900 | RSSQSLLHS | 901 | LGMNRAS | 902 | MQALQTPLT |
| | | FGYNYLD | | | | |
| SS-15510 | 903 | RSSQSLLHS | 904 | LGMNRAS | 905 | MQALQTPLT |
| | | FGYNYLD | | | | |
| SS-15511 | 906 | RSSQSLLHS | 907 | LGHNRAS | 908 | MQALQTPLT |
| | | FGYNYLD | | | | |
| SS-15512 | 909 | RSSQSLLHS | 910 | LGNNRAS | 911 | MQALQTPLT |
| | | FGYNYLD | | | | |
| SS-15513 | 912 | RSSQSLLHS | 913 | LGWNRAS | 914 | MQALQTPLT |
| | | FGYNYLD | | | | |
| SS-15514 | 915 | RSSQSLLHS | 916 | LGQNRAS | 917 | MQALQTPLT |
| | | FGYNYLD | | | | |
| SS-15497 | 918 | RSSQSLLHS | 919 | LGLNRAS | 920 | MQAIHTPLT |
| | | GNGYNYLD | | | | |
| SS-15515 | 921 | RSSQSLLHS | 922 | LGMNRAS | 923 | MQAIHTPLT |
| | | GNGYNYLD | | | | |
| SS-15516 | 924 | RSSQSLLHS | 925 | LGFNRAS | 926 | MQAIHTPLT |
| | | GNGYNYLD | | | | |
| SS-15517 | 927 | RSSQSLLHS | 928 | LGHNRAS | 929 | MQAIHTPLT |
| | | GNGYNYLD | | | | |
| SS-15518 | 930 | RSSQSLLHS | 931 | LGNNRAS | 932 | MQAIHTPLT |
| | | GNGYNYLD | | | | |
| SS-15519 | 933 | RSSQSLLHS | 934 | LGWNRAS | 935 | MQAIHTPLT |
| | | GNGYNYLD | | | | |
| SS-15520 | 936 | RSSQSLLHS | 937 | LGQNRAS | 938 | MQAIHTPLT |
| | | GNGYNYLD | | | | |
| SS-15522 | 939 | RSSQSLLHS | 940 | LGLARAS | 941 | MQALQTPLT |
| | | NGYNYLD | | | | |
| SS-15524 | 942 | RSSQSLLHS | 943 | LGLARAS | 944 | MQALQTPLT |
| | | NGYNYLD | | | | |
| SS-14835 | 945 | RSSQSLLHS | 946 | LGLNRAS | 947 | MQAIHTPLT |
| | | GNGYNYLD | | | | |
| SS-15194 | 948 | RSSQSLLHS | 949 | LGLNRAS | 950 | MQALQTPLT |
| | | NGHNYLD | | | | |
| SS-15195 | 951 | RSSQSLLHS | 952 | LGLNRAS | 953 | MQALQTPLT |
| | | NGHNYLD | | | | |
| SS-15196 | 954 | RSSQSLLHS | 955 | LGLNRAS | 956 | MQAIHTPLT |
| | | GNGYNYLD | | | | |
| SS-14894 | 957 | RSSQSLLHS | 958 | LGLNRAS | 959 | MQALQTPLT |
| | | GNGYNYLD | | | | |
| SS-15504 | 960 | RSSQSLLHS | 961 | LGLNRAH | 962 | MQALQTPLT |
| | | NGHNYLD | | | | |
| SS-15494 | 963 | RSSQSLLHS | 964 | LGLNRAS | 965 | MQALQTPLT |
| | | NGYNYLD | | | | |
| SS-14892 | 966 | RSSQSLLHS | 967 | LGLNRAS | 968 | MQALQTPLT |
| | | FGYNYLD | | | | |
| SS-15495 | 969 | RSSQSLLHS | 970 | LGLNRAH | 971 | MQALQTPLT |
| | | FGHNYLD | | | | |
| SS-15496 | 972 | RSSQSLLHS | 973 | LGLNRAH | 974 | MQALQTPLT |
| | | FGHNYLD | | | | |
| SS-15497 | 975 | RSSQSLLHS | 976 | LGLNRAS | 977 | MQAIHTPLT |
| | | GNGYNYLD | | | | |
| SS-15503 | 978 | RSSQSLLHS | 979 | LGLNRAS | 980 | MQALQTPLT |
| | | FGYNYLD | | | | |
| SS-15505 | 981 | RSSQSLLHS | 982 | LGLNRAH | 983 | MQALQTPLT |
| | | NGHNYLD | | | | |
| SS-15506 | 984 | RSSQSLLHS | 985 | LGLNRAH | 986 | MQALQTPLT |
| | | NGHNYLD | | | | |
| SS-15507 | 987 | RSSQSLLHS | 988 | LGLNRAS | 989 | MQALQTPLT |
| | | NGYNYLD | | | | |
| SS-15502 | 990 | RSSQSLLHS | 991 | LGLNRAS | 992 | MQALQTPLT |
| | | NGYNYLD | | | | |
| SS-15508 | 993 | RSSQSLLHS | 994 | LGLNRAH | 995 | MQALQTPLT |
| | | FGHNYLD | | | | |
| SS-15501 | 996 | RSSQSLLHS | 997 | LGLNRAH | 998 | MQALQTPLT |
| | | YGHNYLD | | | | |
| SS-15500 | 999 | RSSQSLLHS | 1000 | LGLNRAH | 1001 | MQALQTPLT |
| | | YGHNYLD | | | | |
| SS-15003 | 1002 | SGSSSNIGN | 1003 | DYNKRPS | 1004 | GTWDSSLS |
| | | NFVS | | | | AYV |
| SS-15005 | 1005 | RASQSISIYLN | 1006 | AAASLQS | 1007 | QQSYSAPIT |
| SS-15757 | 1008 | RSSQSLLHS | 1009 | LGSNRAS | 1010 | MQAMQTPLT |
| (P1F4) | | NGYNYLD | | | | |
| SS-15758 | 1011 | RSSQSLLHS | 1012 | LGSNRAS | 1013 | MQALQTPLT |
| (P1B6) | | NGYNYLD | | | | |
| SS-15759 | 1014 | RSSQSLLHS | 1015 | LGSNRAS | 1016 | MQALQTPLT |
| (P2F4) | | NMYNYLD | | | | |
| SS-15761 | 1017 | RSSQSLLHS | 1018 | LGSNRAS | 1019 | MQALQTPLT |
| (P2G5) | | NQYNYLD | | | | |
| SS-15763 | 1020 | RSSQSLMHS | 1021 | LGSNRAS | 1022 | MQALQTPLT |
| (P2H7) | | NGYNYLD | | | | |
| SS-15764 | 1023 | RSSQSLLHS | 1024 | LGINRAS | 1025 | MQALQTPLT |
| (P2H8) | | NGYNYLD | | | | |

[0114] The structure and properties of CDRs within a naturally occurring antibody has been described, supra. Briefly, in a traditional antibody, the CDRs are embedded within a framework in the heavy and light chain variable region where they constitute the regions responsible for antigen binding and recognition. A variable region comprises at least three heavy or light chain CDRs, see, e.g., Kabat et al., (1991) “Sequences of Proteins of Immunological Interest”, 5′ Ed., US Dept. of Health and Human Services, PHS, NIH, NIH Publication no. 91-3242; see also Chothia and Lesk, (1987) J. Mol. Biol. 196:901-917; Chothia et al., (1989) Nature 342: 877-883), within a framework region (designated framework regions 1-4, FR1, FR2, FR3, and FR4, by Kabat et al., (1991); see also Chothia and Lesk, (1987) supra). The CDRs provided herein, however, can not only be used to define the antigen binding domain of a traditional antibody structure, but can be embedded in a variety of other polypeptide structures, as described herein.

[0115] In another aspect, an antigen binding protein comprises 1, 2, 3, 4, 5, or 6 variant forms of the CDRs listed in Tables 3A and 3B, infra, each having at least 80%, 85%, 90%, 95%, 96%, 97%, 98%, or 99% sequence identity to a CDR sequence listed in Tables 3A and 3B, infra. Some antigen binding proteins comprise 1, 2, 3, 4, 5, or 6 of the CDRs listed in Tables 3A and 3B, infra, each differing by no more than 1, 2, 3, 4 or 5 amino acids from the CDRs listed in these tables.

### Exemplary Antigen Binding Proteins

[0116] In one aspect, also provided is an antigen binding protein that specifically binds to a linear or three-dimensional epitope comprising one or more amino acid residues from PCSK9, particularly cleaved, mature, human PCSK9.

[0117] In a further embodiment, the first amino acid sequence of the isolated antigen binding protein comprises the CDRH3, the CDRH2 and the CDRH1 parings shown in Table 3A for each clone, and/or the second amino acid sequence of the isolated antigen binding protein comprises the CDRL3, the CDRL2 and the CDRL1 pairings shown in Table 3B or each clone.

[0118] In a further embodiment, the antigen binding protein comprises at least, one, at least two, or at least 3 CDRH sequences of heavy chain sequences shown in Table 1B.

[0119] In again a further embodiment, the antigen binding protein comprises at least one, two or three CDRL sequences of light chain sequences Table 1A.

[0120] In still a further embodiment, the antigen binding protein comprises at least one, two or three CDRH sequences of heavy chain variable sequences Tables 3B and at least one, two or three CDRLs of light chain sequences shown in Table 1A.

[0121] In again another embodiment, the antigen binding protein comprises the CDRH1, CDRH2, and CDRH3 sequences of any one of the heavy chain sequences shown in Tables 1B

[0122] In yet another embodiment, the antigen binding protein comprises the CDRL1, CDRL2, and CDRL3 sequences of any of the light chain sequences shown in Tables 1A.

[0123] In one aspect, the isolated antigen binding proteins that specifically bind to PCSK9 provided herein can be a monoclonal antibody, a polyclonal antibody, a recombinant antibody, a human antibody, a humanized antibody, a chimeric antibody, a multispecific antibody, or an antibody fragment thereof.

[0124] In another embodiment, the antibody fragment of the isolated antigen-binding proteins provided herein can be a Fab fragment, a Fab′ fragment, an F(ab′)₂ fragment, an Fv fragment, a diabody, or a single chain antibody molecule.

[0125] In a further embodiment, an isolated antigen binding protein that specifically binds to PCSK9 provided herein is a human antibody and can be of the IgG1-, IgG2-IgG3- or IgG4-type.

[0126] In another embodiment, an isolated antigen binding protein that specifically binds to PCSK9 comprises a light or a heavy chain polypeptide as set forth in Tables 1A-1B. In some embodiments, an antigen binding protein that specifically binds to PCSK9 comprises a variable light or variable heavy domain such as those listed in Tables 2A-2B. In still other embodiments, an antigen binding protein that specifically binds to PCSK9 comprises one, two or three CDRHs or one, two or three CDRLs as set forth in Tables 3A-3B, 4A-4B, infra. Such antigen binding proteins, and indeed any of the antigen binding proteins disclosed herein, can be PEGylated with one or more PEG molecules, for examples PEG molecules having a molecular weight selected from the group consisting of 5K, 10K, 20K, 40K, 50K, 60K, 80K, 100K or greater than 100K.

[0127] In yet another aspect, any antigen binding protein that specifically binds to PCSK9 provided herein can be coupled to a labeling group and can compete for binding to PCSK9 with an antigen binding protein of one of the isolated antigen binding proteins provided herein. In one embodiment, the isolated antigen binding protein provided herein can decrease blood triglyceride and cholesterol levels or improve other cardiovascular risk factors when administered to a patient, such as decrease blood total cholesterol, LDL-C, VLDL-C, apolipoprotein B, non-HDL-C, lipoprotein (a), and increase HDL-C.

[0128] As will be appreciated, for any antigen binding protein comprising more than one CDR provided in Tables 3A-3B, any combination of CDRs independently selected from the depicted sequences may be useful. Thus, antigen binding proteins with one, two, three, four, five or six of independently selected CDRs can be generated. However, as will be appreciated by those in the art, specific embodiments generally utilize combinations of CDRs that are non-repetitive, e.g., antigen binding proteins are generally not made with two CDRH2 regions, etc.

[0129] Some of the antigen binding proteins that specifically bind to PCSK9 that are provided herein are discussed in more detail below.

### Antigen Binding Proteins and Binding Epitopes and Binding Domains

[0130] When an antigen binding protein is said to bind an epitope on PCSK9, what is meant is that the antigen binding protein specifically binds to a specified portion of PCSK9. In some embodiments, the antigen binding protein can specifically bind to a polypeptide consisting of specified residues (e.g., a specified segment of PCSK9).

[0131] In any of the foregoing embodiments, such an antigen binding protein does not need to contact every residue of PCSK9. Nor does every single amino acid substitution or deletion within PCSK9, necessarily significantly affect binding affinity.

[0132] Epitope specificity and the binding domain(s) of an antigen binding protein can be determined by a variety of methods. Some methods, for example, can use truncated portions of an antigen. Other methods utilize antigen mutated at one or more specific residues, such as by employing an alanine scanning or arginine scanning-type approach or by the generation and study of chimeric proteins in which various domains, regions or amino acids are swapped between two proteins (e.g., mouse and human forms of one or more of the antigens or target proteins), or by protease protection assays.

### Further Embodiments

[0133] In a further embodiment, an isolated antigen binding protein, such as a human antibody, is provided that binds to PCSK9 with substantially the same Kd as a reference antibody; reduces the ability of PCSK9 to block LDL uptake in vitro in human HepG2 cell assay (or other suitable cell line or primary cell in culture) to the same degree as a reference antibody; lowers blood glucose; lowers serum cholesterol levels; and/or competes for binding with said reference antibody to PCSK9, wherein the reference antibody is selected from the group consisting SS-13406 (8A3HLE-51), SS-13407 (8A3HLE-112), SS-14888 (P2C6-HLE51), 13G9, 19A12, 20D12, 25B5, 30G7, SS-15057, SS-15058, SS-15059, SS-15065, SS-15079, SS-15080, SS-15087, SS-15101, SS-15103, SS-15104, SS-15105, SS-15106, SS-15108, SS-15112, SS-15113, SS-15114, SS-15117, SS-15121, SS-15123, SS-15124, SS-15126, SS-15132, SS-15133, SS-15136, SS-15139, SS-15140, SS-15141, SS-13983 (A01), SS-13991 (A02), SS-13993 (C02), SS-12685 (P1B1), SS-12686 (P2F5), SS-12687 (P2C6), SS-14892 (P2F5/P2C6), SS-15509, SS-15510, SS-15511, SS-15512, SS-15513, SS-15514, SS-15497, SS-15515, SS-15516, SS-15517, SS-15518, SS-15519, SS-15520, SS-15522, SS-15524, SS-14835, SS-15194, SS-15195, SS-15196, SS-14894, SS-15504, SS-15494, SS-14892, SS-15495, SS-15496, SS-15497, SS-15503, SS-15505, SS-15506, SS-15507, SS-15502, SS-15508, SS-1550, SS-15500, SS-15003, SS-15005, SS-15757 (P1F4), SS-15758 (P1B6), SS-15759 (P2F4), SS-15761 (P2G5), SS-15763 (P2H7) and SS-15764 (P2H8).

[0134] The ability to compete with an antibody can be determined using any suitable assay, such as those described herein, in which antigen binding proteins SS-13406 (8A3HLE-51), SS-13407 (8A3HLE-112), SS-14888 (P2C6-HLE51), 13G9, 19A12, 20D12, 25B5, 30G7, SS-15057, SS-15058, SS-15059, SS-15065, SS-15079, SS-15080, SS-15087, SS-15101, SS-15103, SS-15104, SS-15105, SS-15106, SS-15108, SS-15112, SS-15113, SS-15114, SS-15117, SS-15121, SS-15123, SS-15124, SS-15126, SS-15132, SS-15133, SS-15136, SS-15139, SS-15140, SS-15141, SS-13983 (A01), SS-13991 (A02), SS-13993 (C02), SS-12685 (P1B1), SS-12686 (P2F5), SS-12687 (P2C6), SS-14892 (P2F5/P2C6), SS-15509, SS-15510, SS-15511, SS-15512, SS-15513, SS-15514, SS-15497, SS-15515, SS-15516, SS-15517, SS-15518, SS-15519, SS-15520, SS-15522, SS-15524, SS-14835, SS-15194, SS-15195, SS-15196, SS-14894, SS-15504, SS-15494, SS-14892, SS-15495, SS-15496, SS-15497, SS-15503, SS-15505, SS-15506, SS-15507, SS-15502, SS-15508, SS-1550, SS-15500, SS-15003, SS-15005, SS-15757 (P1F4), SS-15758 (P1B6), SS-15759 (P2F4), SS-15761 (P2G5), SS-15763 (P2H7) or SS-15764 (P2H8). can be used as the reference antibody.

### Monoclonal Antibodies

[0135] The antigen binding proteins that are provided include monoclonal antibodies that bind to PCSK9, and inhibit PCSK9 binding to LDLR to various degrees. Monoclonal antibodies can be produced using any technique known in the art, e.g., by immortalizing spleen cells harvested from the transgenic animal after completion of the immunization schedule. The spleen cells can be immortalized using any technique known in the art, e.g., by fusing them with myeloma cells to produce hybridomas. Myeloma cells for use in hybridoma-producing fusion procedures preferably are non-antibody-producing, have high fusion efficiency, and enzyme deficiencies that render them incapable of growing in certain selective media which support the growth of only the desired fused cells (hybridomas). Examples of suitable cell lines for use in mouse fusions include Sp-20, P3-X63/Ag8, P3-X63-Ag8.653, NS1/1.Ag 4 1, Sp210-Ag14, FO, NSO/U, MPC-11, MPC11-X45-GTG 1.7 and S194/5XXO Bul; examples of cell lines used in rat fusions include R210.RCY3, Y3-Ag 1.2.3, IR983F and 4B210. Other cell lines useful for cell fusions are U-266, GM1500-GRG2, LICR-LON-HMy2 and UC729-6.

[0136] In some instances, a hybridoma cell line is produced by immunizing an animal (e.g., a transgenic animal having human immunoglobulin sequences) with an immunogen comprising (1) self-cleaved, mature, secreted PCSK9 comprising amino acids 31 to 692 of the amino acid sequence of SEQ ID NO: 2 (as shown in Example 1); harvesting spleen cells from the immunized animal; fusing the harvested spleen cells to a myeloma cell line, thereby generating hybridoma cells; establishing hybridoma cell lines from the hybridoma cells (as shown in Example 2), and identifying a hybridoma cell line that produces an antibody that binds to PCSK9 and blocks PCSK9 from binding to LDLR (e.g., as described in Example 3). Such hybridoma cell lines, and the monoclonal antibodies produced by them, form aspects of the present disclosure.

[0137] Monoclonal antibodies secreted by a hybridoma cell line can be purified using any technique known in the art. Hybridomas or mAbs can be further screened to identify mAbs with particular properties, such as the ability to block PCSK9 from binding to LDLR. Examples of such screens are provided herein.

### Chimeric and Humanized Antibodies

[0138] Chimeric and humanized antibodies based upon the foregoing sequences can readily be generated. One example is a chimeric antibody, which is an antibody composed of protein segments from different antibodies that are covalently joined to produce functional immunoglobulin light or heavy chains or immunologically functional portions thereof.

[0139] Generally, a portion of the heavy chain and/or light chain is identical with or homologous to a corresponding sequence in antibodies derived from a particular species or belonging to a particular antibody class or subclass, while the remainder of the chain(s) is/are identical with or homologous to a corresponding sequence in antibodies derived from another species or belonging to another antibody class or subclass. For methods relating to chimeric antibodies, see, for example, U.S. Pat. No. 4,816,567; and Morrison et al., (1985) Proc. Natl. Acad. Sci. USA 81:6851-6855, which are hereby incorporated by reference. CDR grafting is described, for example, in U.S. Pat. No. 6,180,370, No. 5,693,762, No. 5,693,761, No. 5,585,089, and No. 5,530,101.

[0140] Generally, a goal of making a chimeric antibody is to create a chimera in which the number of amino acids from the intended patient/recipient species is maximized. One example is the “CDR-grafted” antibody, in which the antibody comprises one or more complementarity determining regions (CDRs) from a particular species or belonging to a particular antibody class or subclass, while the remainder of the antibody chain(s) is/are identical with or homologous to a corresponding sequence in antibodies derived from another species or belonging to another antibody class or subclass. For use in humans, the variable region or selected CDRs from a rodent antibody often are grafted into a human antibody, replacing the naturally-occurring variable regions or CDRs of the human antibody.

[0141] One useful type of chimeric antibody is a “humanized” antibody. Generally, a humanized antibody is produced from a monoclonal antibody raised initially in a non-human animal. Certain amino acid residues in this monoclonal antibody, typically from non-antigen recognizing portions of the antibody, are modified to be homologous to corresponding residues in a human antibody of corresponding isotype. Humanization can be performed, for example, using various methods by substituting at least a portion of a rodent variable region for the corresponding regions of a human antibody (see, e.g., U.S. Pat. No. 5,585,089, and U.S. Pat. No. 5,693,762; Jones et al., (1986) Nature 321:522-525; Riechmann et al., (1988) Nature 332:323-27; Verhoeyen et al., (1988) Science 239:1534-1536).

[0142] In one aspect, the CDRs of the light and heavy chain variable regions of the antibodies provided herein (e.g., in Tables 3-4 and 21-23) are grafted to framework regions (FRs) from antibodies from the same, or a different, phylogenetic species. For example, the CDRs of the heavy and light chain variable regions V_{H}1, V_{H}2, V_{H}3, V_{H}4, V_{H}5, V_{H}6, V_{H}7, V_{H}8, V_{H}9, V_{H}10, V_{H}11, V_{H}12, V_{H}13, V_{H}14, V_{H}5, V_{H}16, V_{H}17, V_{H}18, V_{H}19, V_{H}20, V H21 V_{H}22, V_{H}23, V_{H}24, V_{H}25, V_{H}26, V_{H}27, V_{H}28, V_{H}29, V_{H}30, V_{H}31, V_{H}32, V_{H}33, V_{H}34, V_{H}35, V_{H}36, V_{H}37, V_{H}38, V_{H}39, V_{H}40, V_{H}41, V_{H}42, V_{H}43, V_{H}44, V_{H}45, V_{H}46, V_{H}47, V_{H}48, V_{H}49, V_{H}50, V_{H}51, V_{H}52, V_{H}53, V_{H}54, V_{H}55, V_{H}56, V_{H}57, V_{H}58, V_{H}59, V_{H}60, V_{H}61, V_{H}62, V_{H}63, V_{H}64, V_{H}65, V_{H}66, V_{H}67, V_{H}68, V_{H}69, V_{H}70, V_{H}71, V_{H}72, V_{H}73, V_{H}74, V_{H}75, V_{H}76, V_{H}77, V H78, V_{H}79, V_{H}80, 81, V_{H}82, V_{H}83, V_{H}84, V_{H}85, V_{H}86, V_{H}87, V_{H}88, V_{H}89, V_{H}90, V_{H}91, V_{H}92, V_{H}93, and V_{H}94 and/or V_{L}1, V_{L}2, V_{L}3, V_{L}4, V_{L}5, V_{L}6, V_{L}7, V_{L}8, V_{L}9, V_{L}10, V_{L}11, V_{L}12, V_{L}13, V_{L}14, V_{L}15, V_{L}16, V_{L}17, V_{L}18, V_{L}19, V_{L}20, V_{L}21, V_{L}22, V_{L}23, V_{L}24, V_{L}25, V_{L}26, V_{L}27, V_{L}28, V_{L}29, V_{L}30, V_{L}31, V_{L}32, V_{L}33, V_{L}34, V_{L}35, V_{L}36, V_{L}37, V_{L}38, V_{L}39, V_{L}40, V_{L}41, V_{L}42, V_{L}43, V_{L}44, V_{L}45, V_{L}46, V_{L}47, V_{L}48, V_{L}49, V_{L}50, V_{L}51, V_{L}52, V_{L}53, V_{L}54, V_{L}55, V_{L}56, V_{L}57, V_{L}58, V_{L}59, V_{L}60, V_{L}61, V_{L}62, V_{L}63, V_{L}64, V_{L}65, V_{L}66, V_{L}67, V_{L}68, V_{L}69, V_{L}70, V_{L}71, V_{L}72, V_{L}73, V_{L}74, V_{L}75, V_{L}76, V_{L}77, V_{L}78, V_{L}79, V_{L}80, V_{L}81, V_{L}82, V_{L}83, V_{L}84, V_{L}85, V_{L}86, V_{L}87, V_{L}88, V_{L}89, V_{L}90, V_{L}91, V_{L}92, V_{L}93, V_{L}94, V_{L}95, V_{L}96, V_{L}97, V_{L}98, V_{L}99 and V_{L}100 can be grafted to consensus human FRs. To create consensus human FRs, FRs from several human heavy chain or light chain amino acid sequences can be aligned to identify a consensus amino acid sequence. In other embodiments, the FRs of a heavy chain or light chain disclosed herein are replaced with the FRs from a different heavy chain or light chain. In one aspect, rare amino acids in the FRs of the heavy and light chains of an antigen binding protein (e.g., an antibody) that specifically binds to a PCSK9 are not replaced, while the rest of the FR amino acids are replaced. A “rare amino acid” is a specific amino acid that is in a position in which this particular amino acid is not usually found in an FR. Alternatively, the grafted variable regions from the one heavy or light chain can be used with a constant region that is different from the constant region of that particular heavy or light chain as disclosed herein. In other embodiments, the grafted variable regions are part of a single chain Fv antibody.

[0143] In certain embodiments, constant regions from species other than human can be used along with the human variable region(s) to produce hybrid antibodies.

### Fully Human Antibodies

[0144] Fully human antibodies are provided by the instant disclosure. Methods are available for making fully human antibodies specific for a given antigen without exposing human beings to the antigen (“fully human antibodies”). One specific means provided for implementing the production of fully human antibodies is the “humanization” of the mouse humoral immune system. Introduction of human immunoglobulin (Ig) loci into mice in which the endogenous Ig genes have been inactivated is one means of producing fully human monoclonal antibodies (mAbs) in mouse, an animal that can be immunized with any desirable antigen. Using fully human antibodies can minimize the immunogenic and allergic responses that can sometimes be caused by administering mouse or mouse-derived mAbs to humans as therapeutic agents.

[0145] Fully human antibodies can be produced by immunizing transgenic animals (typically mice) that are capable of producing a repertoire of human antibodies in the absence of endogenous immunoglobulin production. Antigens for this purpose typically have six or more contiguous amino acids, and optionally are conjugated to a carrier, such as a hapten. See, e.g., Jakobovits et al., (1993) Proc. Natl. Acad. Sci. USA 90:2551-2555; Jakobovits et al., (1993) Nature 362:255-258; and Bruggermann et al., (1993) Year in Immunol. 7:33. In one example of such a method, transgenic animals are produced by incapacitating the endogenous mouse immunoglobulin loci encoding the mouse heavy and light immunoglobulin chains therein, and inserting into the mouse genome large fragments of human genome DNA containing loci that encode human heavy and light chain proteins. Partially modified animals, which have less than the full complement of human immunoglobulin loci, are then cross-bred to obtain an animal having all of the desired immune system modifications. When administered an immunogen, these transgenic animals produce antibodies that are immunospecific for the immunogen but have human rather than murine amino acid sequences, including the variable regions. For further details of such methods, see, e.g., WO96/33735 and WO94/02602. Additional methods relating to transgenic mice for making human antibodies are described in U.S. Pat. No. 5,545,807; U.S. Pat. No. 6,713,610; U.S. Pat. No. 6,673,986; U.S. Pat. No. 6,162,963; U.S. Pat. No. 5,545,807; U.S. Pat. No. 6,300,129; U.S. Pat. No. 6,255,458; U.S. Pat. No. 5,877,397; U.S. Pat. No. 5,874,299 and U.S. Pat. No. 5,545,806; in PCT publications WO91/10741, WO90/04036, and in EP 546073 and EP 546073.

[0146] According to certain embodiments, antibodies of the invention can be prepared through the utilization of a transgenic mouse that has a substantial portion of the human antibody producing genome inserted but that is rendered deficient in the production of endogenous, murine antibodies. Such mice, then, are capable of producing human immunoglobulin molecules and antibodies and are deficient in the production of murine immunoglobulin molecules and antibodies. Technologies utilized for achieving this result are disclosed in the patents, applications and references disclosed in the specification, herein. In certain embodiments, one can employ methods such as those disclosed in PCT Published Application No. WO 98/24893 or in Mendez et al., (1997) Nature Genetics, 15:146-156, which are hereby incorporated by reference for any purpose.

[0147] Generally, fully human monoclonal antibodies specific for PCSK9 can be produced as follows. Transgenic mice containing human immunoglobulin genes are immunized with the antigen of interest, e.g. those described herein, lymphatic cells (such as B-cells) from the mice that express antibodies are obtained. Such recovered cells are fused with a myeloid-type cell line to prepare immortal hybridoma cell lines, and such hybridoma cell lines are screened and selected to identify hybridoma cell lines that produce antibodies specific to the antigen of interest. In certain embodiments, the production of a hybridoma cell line that produces antibodies specific to PCSK9 is provided.

[0148] In certain embodiments, fully human antibodies can be produced by exposing human splenocytes (B or T cells) to an antigen in vitro, and then reconstituting the exposed cells in an immunocompromised mouse, e.g. SCID or nod/SCID. See, e.g., Brams et al., J. Immunol. 160: 2051-2058 (1998); Carballido et al., Nat. Med., 6: 103-106 (2000). In certain such approaches, engraftment of human fetal tissue into SCID mice (SCID-hu) results in long-term hematopoiesis and human T-cell development. See, e.g., McCune et al., Science, 241:1532-1639 (1988); Ifversen et al., Sem. Immunol., 8:243-248 (1996). In certain instances, humoral immune response in such chimeric mice is dependent on co-development of human T-cells in the animals. See, e.g., Martensson et al., Immunol., 83:1271-179 (1994). In certain approaches, human peripheral blood lymphocytes are transplanted into SCID mice. See, e.g., Mosier et al., Nature, 335:256-259 (1988). In certain such embodiments, when such transplanted cells are treated either with a priming agent, such as Staphylococcal Enterotoxin A (SEA), or with anti-human CD40 monoclonal antibodies, higher levels of B cell production is detected. See, e.g., Martensson et al., Immunol., 84: 224-230 (1995); Murphy et al., Blood, 86:1946-1953 (1995).

[0149] Thus, in certain embodiments, fully human antibodies can be produced by the expression of recombinant DNA in host cells or by expression in hybridoma cells. In other embodiments, antibodies can be produced using the phage display techniques described herein.

[0150] The antibodies described herein were prepared through the utilization of the XENOMOUSE® technology, as described herein. Such mice, then, are capable of producing human immunoglobulin molecules and antibodies and are deficient in the production of murine immunoglobulin molecules and antibodies. Technologies utilized for achieving the same are disclosed in the patents, applications, and references disclosed in the background section herein. In particular, however, a preferred embodiment of transgenic production of mice and antibodies therefrom is disclosed in U.S. patent application Ser. No. 08/759,620, filed Dec. 3, 1996 and International Patent Application Nos. WO 98/24893, published Jun. 1, 1998 and WO 00/76310, published Dec. 21, 2000, the disclosures of which are hereby incorporated by reference. See also Mendez et al., Nature Genetics, 15:146-156 (1997), the disclosure of which is hereby incorporated by reference.

[0151] Through the use of such technology, fully human monoclonal antibodies to a variety of antigens have been produced. Essentially, XENOMOUSE® lines of mice are immunized with an antigen of interest (e.g. an antigen provided herein), lymphatic cells (such as B-cells) are recovered from the hyper-immunized mice, and the recovered lymphocytes are fused with a myeloid-type cell line to prepare immortal hybridoma cell lines. These hybridoma cell lines are screened and selected to identify hybridoma cell lines that produced antibodies specific to the antigen of interest. Provided herein are methods for the production of multiple hybridoma cell lines that produce antibodies specific to PCSK9. Further, provided herein are characterization of the antibodies produced by such cell lines, including nucleotide and amino acid sequence analyses of the heavy and light chains of such antibodies.

[0152] The production of the XENOMOUSE® strains of mice is further discussed and delineated in U.S. patent application Ser. No. 07/466,008, filed Jan. 12, 1990, Ser. No. 07/610,515, filed Nov. 8, 1990, Ser. No. 07/919,297, filed Jul. 24, 1992, Ser. No. 07/922,649, filed Jul. 30, 1992, Ser. No. 08/031,801, filed Mar. 15, 1993, Ser. No. 08/112,848, filed Aug. 27, 1993, Ser. No. 08/234,145, filed Apr. 28, 1994, Ser. No. 08/376,279, filed Jan. 20, 1995, Ser. No. 08/430,938, filed Apr. 27, 1995, Ser. No. 08/464,584, filed Jun. 5, 1995, Ser. No. 08/464,582, filed Jun. 5, 1995, Ser. No. 08/463,191, filed Jun. 5, 1995, Ser. No. 08/462,837, filed Jun. 5, 1995, Ser. No. 08/486,853, filed Jun. 5, 1995, Ser. No. 08/486,857, filed Jun. 5, 1995, Ser. No. 08/486,859, filed Jun. 5, 1995, Ser. No. 08/462,513, filed Jun. 5, 1995, Ser. No. 08/724,752, filed Oct. 2, 1996, Ser. No. 08/759,620, filed Dec. 3, 1996, U.S. Publication 2003/0093820, filed Nov. 30, 2001 and U.S. Pat. Nos. 6,162,963, 6,150,584, 6,114,598, 6,075,181, and 5,939,598 and Japanese Patent Nos. 3 068 180 B2, 3 068 506 B2, and 3 068 507 B2. See also European Patent No., EP 0 463 151 B1, grant published Jun. 12, 1996, International Patent Application No., WO 94/02602, published Feb. 3, 1994, International Patent Application No., WO 96/34096, published Oct. 31, 1996, WO 98/24893, published Jun. 11, 1998, WO 00/76310, published Dec. 21, 2000. The disclosures of each of the above-cited patents, applications, and references are hereby incorporated by reference in their entirety.

[0153] Using hybridoma technology, antigen-specific human mAbs with the desired specificity can be produced and selected from the transgenic mice such as those described herein. Such antibodies can be cloned and expressed using a suitable vector and host cell, or the antibodies can be harvested from cultured hybridoma cells.

[0154] Fully human antibodies can also be derived from phage-display libraries (as described in Hoogenboom et al., (1991) J. Mol. Biol. 227:381; and Marks et al., (1991) J. Mol. Biol. 222:581). Phage display techniques mimic immune selection through the display of antibody repertoires on the surface of filamentous bacteriophage, and subsequent selection of phage by their binding to an antigen of choice. One such technique is described in PCT Publication No. WO 99/10494 (hereby incorporated by reference), which describes the isolation of high affinity and functional agonistic antibodies for MPL- and msk-receptors using such an approach.

### Bispecific or Bifunctional Antigen Binding Proteins

[0155] Also provided are bispecific and bifunctional antibodies that include one or more CDRs or one or more variable regions as described above. A bispecific or bifunctional antibody in some instances can be an artificial hybrid antibody having two different heavy/light chain pairs and two different binding sites. Bispecific antibodies can be produced by a variety of methods including, but not limited to, fusion of hybridomas or linking of Fab′ fragments. See, e.g., Songsivilai & Lachmann, (1990) Clin. Exp. Immunol. 79:315-321; Kostelny et al., (1992) J. Immunol. 148:1547-1553. When an antigen binding protein of the instant disclosure binds to PCSK9, the binding may lead to the inhibition of PCSK9 binding to LDLR as described in Example 3.

### Various Other Forms

[0156] Some of the antigen binding proteins that specifically bind to PCSK9 that are provided in the present disclosure include variant forms of the antigen binding proteins disclosed herein (e.g., those having the sequences listed in Tables 1-4)

[0157] In various embodiments, the antigen binding proteins disclosed herein can comprise one or more non-naturally occurring/encoded amino acids. For instance, some of the antigen binding proteins have one or more non-naturally occurring/encoded amino acid substitutions in one or more of the heavy or light chains, variable regions or CDRs listed in Tables 3. Examples of non-naturally occurring/encoded amino acids (which can be substituted for any naturally-occurring amino acid found in any sequence disclosed herein, as desired) include: 4-hydroxyproline, γ-carboxyglutamate, ε-N,N,N-trimethyllysine, ε-N-acetyllysine, O-phosphoserine, N-acetylserine, N-formylmethionine. 3-methylhistidine, 5-hydroxylysine, σ-N-methylarginine, and other similar amino acids and imino acids (e.g., 4-hydroxyproline). In the polypeptide notation used herein, the left-hand direction is the amino terminal direction and the right-hand direction is the carboxyl-terminal direction, in accordance with standard usage and convention. A non-limiting lists of examples of non-naturally occurring/encoded amino acids that can be inserted into an antigen binding protein sequence or substituted for a wild-type residue in an antigen binding sequence include β-amino acids, homoamino acids, cyclic amino acids and amino acids with derivatized side chains. Examples include (in the L-form or D-form; abbreviated as in parentheses): citrulline (Cit), homocitrulline (hCit), Nα-methylcitrulline (NMeCit), Nα-methylhomocitrulline (Nα-MeHoCit), ornithine (Orn), Nα-Methylomithine (Nα-MeOm or NMeOrn), sarcosine (Sar), homolysine (hLys or hK), homoarginine (hArg or hR), homoglutamine (hQ), Nα-methylarginine (NMeR), Nα-methylleucine (Nα-MeL or NMeL), N-methylhomolysine (NMeHoK), Nα-methylglutamine (NMeQ), norleucine (Nle), norvaline (Nva), 1,2,3,4-tetrahydroisoquinoline (Tic), Octahydroindole-2-carboxylic acid (Oic), 3-(1-naphthyl)alanine (1-Nal), 3-(2-naphthyl)alanine (2-Nal), 1,2,3,4-tetrahydroisoquinoline (Tic), 2-indanylglycine (Igl), para-iodophenylalanine (pI-Phe), para-aminophenylalanine (4AmP or 4-Amino-Phe), 4-guanidino phenylalanine (Guf), glycyllysine (abbreviated “K(Nε-glycyl)” or “K(glycyl)” or “K(gly)”), nitrophenylalanine (nitrophe), aminophenylalanine (aminophe or Amino-Phe), benzylphenylalanine (benzylphe), γ-carboxyglutamic acid (γ-carboxyglu), hydroxyproline (hydroxypro), p-carboxyl-phenylalanine (Cpa), α-aminoadipic acid (Aad), Nα-methyl valine (NMeVal), N-α-methyl leucine (NMeLeu), Nα-methylnorleucine (NMeNle), cyclopentylglycine (Cpg), cyclohexylglycine (Chg), acetylarginine (acetylarg), α,β-diaminopropionoic acid (Dpr), α,γ-diaminobutyric acid (Dab), diaminopropionic acid (Dap), cyclohexylalanine (Cha), 4-methyl-phenylalanine (MePhe), β,β-diphenyl-alanine (BiPhA), aminobutyric acid (Abu), 4-phenyl-phenylalanine (or biphenylalanine; 4Bip), α-amino-isobutyric acid (Aib), beta-alanine, beta-aminopropionic acid, piperidinic acid, aminocaprioic acid, aminoheptanoic acid, aminopimelic acid, desmosine, diaminopimelic acid, N-ethylglycine, N-ethylaspargine, hydroxylysine, allo-hydroxylysine, isodesmosine, allo-isoleucine, N-methylglycine, N-methylisoleucine, N-methylvaline, 4-hydroxyproline (Hyp), γ-carboxyglutamate, ε-N,N,N-trimethyllysine, ε-N-acetyllysine, O-phosphoserine, N-acetylserine, N-formylmethionine, 3-methylhistidine, 5-hydroxylysine, ω-methylarginine, 4-Amino-O-Phthalic Acid (4APA), and other similar amino acids, and derivatized forms of any of those specifically listed.

[0158] Additionally, the antigen binding proteins can have one or more conservative amino acid substitutions in one or more of the heavy or light chains, variable regions or CDRs listed in Tables 1-4. Naturally-occurring amino acids can be divided into classes based on common side chain properties:

[0159] 1) hydrophobic: norleucine, Met, Ala, Val, Leu, Ile;

[0160] 2) neutral hydrophilic: Cys, Ser, Thr, Asn, Gin;

[0161] 3) acidic: Asp, Glu;

[0162] 4) basic: His, Lys, Arg;

[0163] 5) residues that influence chain orientation: Gly, Pro; and

[0164] 6) aromatic: Trp, Tyr, Phe.

[0165] Conservative amino acid substitutions can involve exchange of a member of one of these classes with another member of the same class. Conservative amino acid substitutions can encompass non-naturally occurring/encoded amino acid residues, which are typically incorporated by chemical peptide synthesis rather than by synthesis in biological systems. Table 8, infra. These include peptidomimetics and other reversed or inverted forms of amino acid moieties.

[0166] Non-conservative substitutions can involve the exchange of a member of one of the above classes for a member from another class. Such substituted residues can be introduced into regions of the antibody that are homologous with human antibodies, or into the non-homologous regions of the molecule.

[0167] In making such changes, according to certain embodiments, the hydropathic index of amino acids can be considered. The hydropathic profile of a protein is calculated by assigning each amino acid a numerical value (“hydropathy index”) and then repetitively averaging these values along the peptide chain. Each amino acid has been assigned a hydropathic index on the basis of its hydrophobicity and charge characteristics. They are: isoleucine (+4.5); valine (+4.2); leucine (+3.8); phenylalanine (+2.8); cysteine/cystine (+2.5); methionine (+1.9); alanine (+1.8); glycine (−0.4); threonine (−0.7); serine (−0.8); tryptophan (−0.9); tyrosine (−1.3); proline (−1.6); histidine (−3.2); glutamate (−3.5); glutamine (−3.5); aspartate (−3.5); asparagine (−3.5); lysine (−3.9); and arginine (−4.5).

[0168] The importance of the hydropathic profile in conferring interactive biological function on a protein is understood in the art (see, e.g., Kyte et al., 1982, J. Mol. Biol. 157:105-131). It is known that certain amino acids can be substituted for other amino acids having a similar hydropathic index or score and still retain a similar biological activity. In making changes based upon the hydropathic index, in certain embodiments, the substitution of amino acids whose hydropathic indices are within ±2 is included. In some aspects, those which are within ±1 are included, and in other aspects, those within ±0.5 are included.

[0169] It is also understood in the art that the substitution of like amino acids can be made effectively on the basis of hydrophilicity, particularly where the biologically functional protein or peptide thereby created is intended for use in immunological embodiments, as in the present case. In certain embodiments, the greatest local average hydrophilicity of a protein, as governed by the hydrophilicity of its adjacent amino acids, correlates with its immunogenicity and antigen-binding or immunogenicity, that is, with a biological property of the protein.

[0170] The following hydrophilicity values have been assigned to these amino acid residues: arginine (+3.0); lysine (+3.0); aspartate (+3.0±1); glutamate (+3.0±1); serine (+0.3); asparagine (+0.2); glutamine (+0.2); glycine (0); threonine (−0.4); proline (−0.5±1); alanine (−0.5); histidine (−0.5); cysteine (−1.0); methionine (−1.3); valine (−1.5); leucine (−1.8); isoleucine (−1.8); tyrosine (−2.3); phenylalanine (−2.5) and tryptophan (−3.4). In making changes based upon similar hydrophilicity values, in certain embodiments, the substitution of amino acids whose hydrophilicity values are within ±2 is included, in other embodiments, those which are within ±1 are included, and in still other embodiments, those within ±0.5 are included. In some instances, one can also identify epitopes from primary amino acid sequences on the basis of hydrophilicity. These regions are also referred to as “epitopic core regions.”

[0171] Exemplary conservative amino acid substitutions are set forth in Table 8.

TABLE 8
Conservative Amino Acid Substitutions

| Original Residue | Exemplary Substitutions |
|---|---|
| Ala | Ser |
| Arg | Lys |
| Asn | Gln, His |
| Asp | Glu |
| Cys | Ser |
| Gln | Asn |
| Glu | Asp |
| Gly | Pro |
| His | Asn, Gln |
| Ile | Leu, Val |
| Leu | Ile, Val |
| Lys | Arg, Gln, Glu |
| Met | Leu, Ile |
| Phe | Met, Leu, Tyr |
| Ser | Thr |
| Thr | Ser |
| Trp | Tyr |
| Tyr | Trp, Phe |
| Val | Ile, Leu |

[0172] A skilled artisan will be able to determine suitable variants of polypeptides as set forth herein using well-known techniques coupled with the information provided herein. One skilled in the art can identify suitable areas of the molecule that can be changed without destroying activity by targeting regions not believed to be important for activity. The skilled artisan also will be able to identify residues and portions of the molecules that are conserved among similar polypeptides. In further embodiments, even areas that can be important for biological activity or for structure can be subject to conservative amino acid substitutions without destroying the biological activity or without adversely affecting the polypeptide structure.

[0173] Additionally, one skilled in the art can review structure-function studies identifying residues in similar polypeptides that are important for activity or structure. In view of such a comparison, one can predict the importance of amino acid residues in a protein that correspond to amino acid residues important for activity or structure in similar proteins. One skilled in the art can opt for chemically similar amino acid substitutions for such predicted important amino acid residues.

[0174] One skilled in the art can also analyze the three-dimensional structure and amino acid sequence in relation to that structure in similar polypeptides. In view of such information, one skilled in the art can predict the alignment of amino acid residues of an antibody with respect to its three dimensional structure. One skilled in the art can choose not to make radical changes to amino acid residues predicted to be on the surface of the protein, since such residues can be involved in important interactions with other molecules. Moreover, one skilled in the art can generate test variants containing a single amino acid substitution at each desired amino acid residue. These variants can then be screened using assays for inhibition of PCSK9 binding to LDLR, (including those described in the Examples provided herein) thus yielding information regarding which amino acids can be changed and which must not be changed. In other words, based on information gathered from such routine experiments, one skilled in the art can readily determine the amino acid positions where further substitutions should be avoided either alone or in combination with other mutations.

[0175] A number of scientific publications have been devoted to the prediction of secondary structure. See, Moult, (1996) Curr. Op. in Biotech. 7:422-427; Chou et al., (1974) Biochem. 13:222-245; Chou et al., (1974) Biochemistry 113:211-222; Chou et al., (1978) Adv. Enzymol. Relat. Areas Mol. Biol. 47:45-148; Chou et al., (1979) Ann. Rev. Biochem. 47:251-276; and Chou et al., (1979) Biophys. J. 26:367-384. Moreover, computer programs are currently available to assist with predicting secondary structure. One method of predicting secondary structure is based upon homology modeling. For example, two polypeptides or proteins that have a sequence identity of greater than 30%, or similarity greater than 40% can have similar structural topologies. The growth of the protein structural database (PDB) has provided enhanced predictability of secondary structure, including the potential number of folds within a polypeptide's or protein's structure. See, Holm et al., (1999) Nucl. Acid. Res. 27:244-247. It has been suggested (Brenner et al., (1997) Curr. Op. Struct. Biol. 7:369-376) that there are a limited number of folds in a given polypeptide or protein and that once a critical number of structures have been resolved, structural prediction will become dramatically more accurate.

[0176] Additional methods of predicting secondary structure include “threading” (Jones, (1997) Curr. Opin. Struct. Biol. 7:377-387; Sippl et al., (1996) Structure 4:15-19), “profile analysis” (Bowie et al., (1991) Science 531:164-170; Gribskov et al., (1990) Meth. Enzym. 183:146-159; Gribskov et al., (1987) Proc. Nat. Acad. Sci. 84:4355-4358), and “evolutionary linkage” (See, Holm, (1999) supra; and Brenner, (1997) supra).

[0177] In some embodiments, amino acid substitutions are made that: (1) reduce susceptibility to proteolysis, (2) reduce susceptibility to oxidation, (3) alter binding affinity for forming protein complexes, (4) alter ligand or antigen binding affinities, and/or (4) confer or modify other physicochemical or functional properties on such polypeptides. For example, single or multiple amino acid substitutions (in some embodiments, conservative amino acid substitutions) can be made in the naturally-occurring sequence. Substitutions can be made in that portion of the antibody that lies outside the domain(s) forming intermolecular contacts. In such embodiments, conservative amino acid substitutions can be used that do not substantially change the structural characteristics of the parent sequence (e.g., one or more replacement amino acids that do not disrupt the secondary structure that characterizes the parent or native antigen binding protein). Examples of art-recognized polypeptide secondary and tertiary structures are described in Creighton, Proteins: Structures and Molecular Properties 2^{nd} edition, 1992, W. H. Freeman & Company; Creighton, Proteins: Structures and Molecular Principles, 1984, W. H. Freeman & Company; Introduction to Protein Structure (Branden and Tooze, eds.), 2^{nd} edition, 1999, Garland Publishing; Petsko & Ringe, Protein Structure and Function, 2004, New Science Press Ltd; and Thornton et al., (1991) Nature 5: 105, which are each incorporated herein by reference.

[0178] Additional preferred antibody variants include cysteine variants wherein one or more cysteine residues in the parent or native amino acid sequence are deleted from or substituted with another amino acid (e.g., serine). Cysteine variants are useful, inter alia when antibodies must be refolded into a biologically active conformation. Cysteine variants can have fewer cysteine residues than the native antibody, and typically have an even number to minimize interactions resulting from unpaired cysteines.

[0179] The heavy and light chains, variable regions domains and CDRs that are disclosed can be used to prepare polypeptides that contain an antigen binding region that can specifically bind to a PCSK9 and inhibit PCSK9 binding to LDLR. For example, one or more of the CDRs listed in Tables 3 can be incorporated into a molecule (e.g., a polypeptide) covalently or noncovalently to make an immunoadhesion. An immunoadhesion can incorporate the CDR(s) as part of a larger polypeptide chain, can covalently link the CDR(s) to another polypeptide chain, or can incorporate the CDR(s) noncovalently. The CDR(s) enable the immunoadhesion to bind specifically to a particular antigen of interest (e.g., to PCSK9, including an epitope thereon).

[0180] The heavy and light chains, variable regions domains and CDRs that are disclosed can be used to prepare polypeptides that contain an antigen binding region that can specifically bind to PCSK9 and inhibit PCSK9 from binding to LDLR. For example, one or more of the CDRs listed in Tables 3 can be incorporated into a molecule (e.g., a polypeptide) that is structurally similar to a “half” antibody comprising the heavy chain, the light chain of an antigen binding protein paired with a Fc fragment so that the antigen binding region is monovalent (like a Fab fragment) but with a dimeric Fc moiety.

[0181] Mimetics (e.g., “peptide mimetics” or “peptidomimetics”) based upon the variable region domains and CDRs that are described herein are also provided. These analogs can be peptides, non-peptides or combinations of peptide and non-peptide regions. Fauchere, (1986) Adv. Drug Res. 15:29; Veber and Freidinger, (1985) TINS p. 392; and Evans et al., (1987) J. Med. Chem. 30:1229, which are incorporated herein by reference for any purpose. Peptide mimetics that are structurally similar to therapeutically useful peptides can be used to produce a similar therapeutic or prophylactic effect. Such compounds are often developed with the aid of computerized molecular modeling. Generally, peptidomimetics are proteins that are structurally similar to an antibody displaying a desired biological activity, such as the ability to specifically bind to PCSK9, but have one or more peptide linkages optionally replaced by a linkage selected from: —CH₂NH—, —CH₂S—, —CH₂—CH₂—, —CH—CH-(cis and trans), —COCH₂—, —CH(OH)CH₂—, and —CH₂SO—, by methods well known in the art. Systematic substitution of one or more amino acids of a consensus sequence with a D-amino acid of the same type (e.g., D-lysine in place of L-lysine) can be used in certain embodiments to generate more stable proteins. In addition, constrained peptides comprising a consensus sequence or a substantially identical consensus sequence variation can be generated by methods known in the art (Rizo and Gierasch, (1992) Ann. Rev. Biochem. 61:387), incorporated herein by reference), for example, by adding internal cysteine residues capable of forming intramolecular disulfide bridges which cyclize the peptide.

[0182] Derivatives of the antigen binding proteins that specifically bind to PCSK9 that are described herein are also provided. The derivatized antigen binding proteins can comprise any molecule or substance that imparts a desired property to the antibody or fragment, such as increased half-life in a particular use. The derivatized antigen binding protein can comprise, for example, a detectable (or labeling) moiety (e.g., a radioactive, colorimetric, antigenic or enzymatic molecule, a detectable bead (such as a magnetic or electrodense (e.g., gold) bead), or a molecule that binds to another molecule (e.g., biotin or streptavidin), a therapeutic or diagnostic moiety (e.g., a radioactive, cytotoxic, or pharmaceutically active moiety), or a molecule that increases the suitability of the antigen binding protein for a particular use (e.g., administration to a subject, such as a human subject, or other in vivo or in vitro uses). Examples of molecules that can be used to derivatize an antigen binding protein include albumin (e.g., human serum albumin) and polyethylene glycol (PEG). Albumin-linked and PEGylated derivatives of antigen binding proteins can be prepared using techniques well known in the art. Certain antigen binding proteins include a PEGylated single chain polypeptide as described herein. In one embodiment, the antigen binding protein is conjugated or otherwise linked to transthyretin (“TTR”) or a TTR variant. The TTR or TTR variant can be chemically modified with, for example, a chemical selected from the group consisting of dextran, poly(n-vinyl pyrrolidone), polyethylene glycols, propropylene glycol homopolymers, polypropylene oxide/ethylene oxide co-polymers, polyoxyethylated polyols and polyvinyl alcohols.

[0183] Other derivatives include covalent or aggregative conjugates of the antigen binding proteins that specifically bind to PCSK9 that are disclosed herein with other proteins or polypeptides, such as by expression of recombinant fusion proteins comprising heterologous polypeptides fused to the N-terminus or C-terminus of an antigen binding protein that inhibits PCSK9 from binding LDLR. For example, the conjugated peptide can be a heterologous signal (or leader) polypeptide, e.g., the yeast alpha-factor leader, or a peptide such as an epitope tag. An antigen binding protein-containing fusion protein of the present disclosure can comprise peptides added to facilitate purification or identification of an antigen binding protein that specifically binds to PCSK9 (e.g., a poly-His tag) and that inhibits PCSK9 binding to LDLR. An antigen binding protein that specifically binds to PCSK9 also can be linked to the FLAG peptide as described in Hopp et al., (1988) Bio/Technology 6:1204; and U.S. Pat. No. 5,011,912. The FLAG peptide is highly antigenic and provides an epitope reversibly bound by a specific monoclonal antibody (mAb), enabling rapid assay and facile purification of expressed recombinant protein. Reagents useful for preparing fusion proteins in which the FLAG peptide is fused to a given polypeptide are commercially available (Sigma, St. Louis, Mo.).

[0184] Multimers that comprise one or more antigen binding proteins that specifically bind to PCSK9 form another aspect of the present disclosure. Multimers can take the form of covalently-linked or non-covalently-linked dimers, trimers, or higher multimers. Multimers comprising two or more antigen binding proteins that bind to PCSK9 and which inhibit PCSK9 binding to LDLR are contemplated for use as therapeutics, diagnostics and for other uses as well, with one example of such a multimer being a homodimer. Other exemplary multimers include heterodimers, homotrimers, heterotrimers, homotetramers, heterotetramers, etc.

[0185] One embodiment is directed to multimers comprising multiple antigen binding proteins that specifically bind to PCSK9 joined via covalent or non-covalent interactions between peptide moieties fused to an antigen binding protein that specifically binds to PCSK9. Such peptides can be peptide linkers (spacers), or peptides that have the property of promoting multimerization. Leucine zippers and certain polypeptides derived from antibodies are among the peptides that can promote multimerization of antigen binding proteins attached thereto, as described in more detail herein.

[0186] In particular embodiments, the multimers comprise from two to four antigen binding proteins that bind to PCSK9. The antigen binding protein moieties of the multimer can be in any of the forms described above, e.g., variants or fragments. Preferably, the multimers comprise antigen binding proteins that have the ability to specifically bind to PCSK9.

[0187] In one embodiment, an oligomer is prepared using polypeptides derived from immunoglobulins. Preparation of fusion proteins comprising certain heterologous polypeptides fused to various portions of antibody-derived polypeptides (including the Fc domain) has been described, e.g., by Ashkenazi et al., (1991) Proc. Natl. Acad. Sci. USA 88:10535; Byrn et al., (1990) Nature 344:677; and Hollenbaugh et al., (1992) Current Protocols in Immunology, Suppl. 4, pages 10.19.1-10.19.11.

[0188] One embodiment comprises a dimer comprising two fusion proteins created by fusing an antigen binding protein that specifically binds to PCSK9 to the Fc region of an antibody. The dimer can be made by, for example, inserting a gene fusion encoding the fusion protein into an appropriate expression vector, expressing the gene fusion in host cells transformed with the recombinant expression vector, and allowing the expressed fusion protein to assemble much like antibody molecules, whereupon interchain disulfide bonds form between the Fc moieties to yield the dimer.

[0189] The term “Fc polypeptide” as used herein includes native and mutein forms of polypeptides derived from the Fc region of an antibody. Truncated forms of such polypeptides containing the hinge region that promotes dimerization also are included.

[0190] Fusion proteins comprising Fc moieties (and oligomers formed therefrom) offer the advantage of facile purification by affinity chromatography over Protein A or Protein G columns.

[0191] One suitable Fc polypeptide, described in PCT application WO 93/10151 and U.S. Pat. No. 5,426,048 and U.S. Pat. No. 5,262,522, is a single chain polypeptide extending from the N-terminal hinge region to the native C-terminus of the Fc region of a human IgG1 antibody. Another useful Fc polypeptide is the Fc mutein described in U.S. Pat. No. 5,457,035, and in Baum et al., (1994) EMBO J. 13:3992-4001. The amino acid sequence of this mutein is identical to that of the native Fc sequence presented in WO 93/10151, except that amino acid 19 has been changed from Leu to Ala, amino acid 20 has been changed from Leu to Glu, and amino acid 22 has been changed from Gly to Ala. The mutein exhibits reduced affinity for Fc receptors.

[0192] In other embodiments, the variable portion of the heavy and/or light chains of a antigen binding protein such as disclosed herein can be substituted for the variable portion of an antibody heavy and/or light chain.

[0193] Alternatively, the oligomer is a fusion protein comprising multiple antigen binding proteins that specifically bind to PCSK9 with or without peptide linkers (spacer peptides). Among the suitable peptide linkers are those described in U.S. Pat. No. 4,751,180 and U.S. Pat. No. 4,935,233.

[0194] Another method for preparing oligomeric derivatives comprising that antigen binding proteins that specifically bind to a PCSK9 involves use of a leucine zipper. Leucine zipper domains are peptides that promote oligomerization of the proteins in which they are found. Leucine zippers were originally identified in several DNA-binding proteins (Landschultz et al., (1988) Science 240:1759-64), and have since been found in a variety of different proteins. Among the known leucine zippers are naturally occurring peptides and derivatives thereof that dimerize or trimerize. Examples of leucine zipper domains suitable for producing soluble oligomeric proteins are described in PCT application WO 94/10308, and the leucine zipper derived from lung surfactant protein D (SPD) described in Hoppe et al., (1994) FEBS Letters 344:191, hereby incorporated by reference. The use of a modified leucine zipper that allows for stable trimerization of a heterologous protein fused thereto is described in Fanslow et al., (1994) Semin. Immunol. 6:267-278. In one approach, recombinant fusion proteins comprising an antigen binding protein fragment or derivative that specifically binds to PCSK9 is fused to a leucine zipper peptide are expressed in suitable host cells, and the soluble oligomeric antigen binding protein fragments or derivatives that form are recovered from the culture supernatant.

[0195] In certain embodiments, the antigen binding protein has a K_{D} (equilibrium binding affinity) of less than 1 pM, 10 pM, 100 pM, 1 nM, 2 nM, 5 nM, 10 nM, 25 nM or 50 nM.

[0196] In another aspect the instant disclosure provides an antigen binding protein having a half-life of at least one day in vitro or in vivo (e.g., when administered to a human subject). In one embodiment, the antigen binding protein has a half-life of at least three days. In another embodiment, the antibody or portion thereof has a half-life of four days or longer. In another embodiment, the antibody or portion thereof has a half-life of eight days or longer. In another embodiment, the antibody or portion thereof has a half-life of ten days or longer. In another embodiment, the antibody or portion thereof has a half-life of eleven days or longer. In another embodiment, the antibody or portion thereof has a half-life of fifteen days or longer. In another embodiment, the antibody or antigen-binding portion thereof is derivatized or modified such that it has a longer half-life as compared to the underivatized or unmodified antibody. In another embodiment, an antigen binding protein that specifically binds PCSK9 contains point mutations to increase serum half life, such as described in WO 00/09560, published Feb. 24, 2000, incorporated by reference.

### Glycosylation

[0197] An antigen binding protein that specifically binds to PCSK9 can have a glycosylation pattern that is different or altered from that found in the native species. As is known in the art, glycosylation patterns can depend on both the sequence of the protein (e.g., the presence or absence of particular glycosylation amino acid residues, discussed below), or the host cell or organism in which the protein is produced. Particular expression systems are discussed below.

[0198] Glycosylation of polypeptides is typically either N-linked or O-linked. N-linked refers to the attachment of the carbohydrate moiety to the side chain of an asparagine residue. The tri-peptide sequences asparagine-X-serine and asparagine-X-threonine, where X is any amino acid except proline, are the recognition sequences for enzymatic attachment of the carbohydrate moiety to the asparagine side chain. Thus, the presence of either of these tri-peptide sequences in a polypeptide creates a potential glycosylation site. O-linked glycosylation refers to the attachment of one of the sugars N-acetylgalactosamine, galactose, or xylose, to a hydroxyamino acid, most commonly serine or threonine, although 5-hydroxyproline or 5-hydroxylysine can also be used.

[0199] Addition of glycosylation sites to the antigen binding protein is conveniently accomplished by altering the amino acid sequence such that it contains one or more of the above-described tri-peptide sequences (for N-linked glycosylation sites). The alteration can also be made by the addition of, or substitution by, one or more serine or threonine residues to the starting sequence (for O-linked glycosylation sites). For ease, the antigen binding protein amino acid sequence can be altered through changes at the DNA level, particularly by mutating the DNA encoding the target polypeptide at preselected bases such that codons are generated that will translate into the desired amino acids.

[0200] Another means of increasing the number of carbohydrate moieties on the antigen binding protein is by chemical or enzymatic coupling of glycosides to the protein. These procedures are advantageous in that they do not require production of the protein in a host cell that has glycosylation capabilities for N- and O-linked glycosylation. Depending on the coupling mode used, the sugar(s) can be attached to (a) arginine and histidine; (b) free carboxyl groups; (c) free sulfhydryl groups such as those of cysteine; (d) free hydroxyl groups such as those of serine, threonine, or hydroxyproline; (e) aromatic residues such as those of phenylalanine, tyrosine, or tryptophan; or (f) the amide group of glutamine. These methods are described in WO 87/05330 and in Aplin & Wriston, (1981) CRC Crit. Rev. Biochem. 10:259-306.

[0201] Removal of carbohydrate moieties present on the starting antigen binding protein can be accomplished chemically or enzymatically. Chemical deglycosylation requires exposure of the protein to the compound trifluoromethanesulfonic acid, or an equivalent compound. This treatment results in the cleavage of most or all sugars except the linking sugar (N-acetylglucosamine or N-acetylgalactosamine), while leaving the polypeptide intact. Chemical deglycosylation is described by Hakimuddin et al., (1987) Arch. Biochem. Biophys. 259:52-57 and by Edge et al., (1981) Anal. Biochem. 118:131-37. Enzymatic cleavage of carbohydrate moieties on polypeptides can be achieved by the use of a variety of endo- and exo-glycosidases as described by Thotakura et al., (1987) Meth. Enzymol. 138:350-59. Glycosylation at potential glycosylation sites can be prevented by the use of the compound tunicamycin as described by Duskin et al., (1982) J. Biol. Chem. 257:3105-09. Tunicamycin blocks the formation of protein-N-glycoside linkages.

[0202] Hence, aspects of the present disclosure include glycosylation variants of antigen binding proteins that specifically bind to PCSK9 wherein the number and/or type of glycosylation site(s) has been altered compared to the amino acid sequences of the parent polypeptide. In certain embodiments, antibody protein variants comprise a greater or a lesser number of N-linked glycosylation sites than the native antibody. An N-linked glycosylation site is characterized by the sequence: Asn-X-Ser or Asn-X-Thr, wherein the amino acid residue designated as X can be any amino acid residue except proline. The substitution of amino acid residues to create this sequence provides a potential new site for the addition of an N-linked carbohydrate chain. Alternatively, substitutions that eliminate or alter this sequence will prevent addition of an N-linked carbohydrate chain present in the native polypeptide. For example, the glycosylation can be reduced by the deletion of an Asn or by substituting the Asn with a different amino acid. In other embodiments, one or more new N-linked sites are created. Antibodies typically have a N-linked glycosylation site in the Fe region.

### Labels and Effector Groups

[0203] In some embodiments, an antigen binding protein that specifically binds to PCSK9 comprises one or more labels. The term “labeling group” or “label” means any detectable label. Examples of suitable labeling groups include, but are not limited to, the following: radioisotopes or radionuclides (e.g., ³H, ¹⁴C, ¹⁵N, ³⁵S, ⁹⁰Y, ⁹⁹Tc, ¹¹¹In, ¹²⁵I, ¹³¹I), fluorescent groups (e.g., FITC, rhodamine, lanthanide phosphors), enzymatic groups (e.g., horseradish peroxidase, β-galactosidase, luciferase, alkaline phosphatase), chemiluminescent groups, biotinyl groups, or predetermined polypeptide epitopes recognized by a secondary reporter (e.g., leucine zipper pair sequences, binding sites for secondary antibodies, metal binding domains, epitope tags). In some embodiments, the labeling group is coupled to the antigen binding protein via spacer arms of various lengths to reduce potential steric hindrance. Various methods for labeling proteins are known in the art and can be used as is seen fit.

[0204] The term “effector group” means any group coupled to an antigen binding protein that specifically binds PCSK9 and that acts as a cytotoxic agent. Examples for suitable effector groups are radioisotopes or radionuclides (e.g., ³H, ¹⁴C, ¹⁵N, ³⁵S, ⁹⁰Y, ⁹⁹Tc, ¹¹¹In, ¹²⁵I, ¹³¹I). Other suitable groups include toxins, therapeutic groups, or chemotherapeutic groups. Examples of suitable groups include calicheamicin, auristatins, geldanamycin and cantansine. In some embodiments, the effector group is coupled to the antigen binding protein via spacer arms of various lengths to reduce potential steric hindrance.

[0205] In general, labels fall into a variety of classes, depending on the assay in which they are to be detected: a) isotopic labels, which can be radioactive or heavy isotopes; b) magnetic labels (e.g., magnetic particles); c) redox active moieties; d) optical dyes; enzymatic groups (e.g. horseradish peroxidase, β-galactosidase, luciferase, alkaline phosphatase); e) biotinylated groups; and f) predetermined polypeptide epitopes recognized by a secondary reporter (e.g., leucine zipper pair sequences, binding sites for secondary antibodies, metal binding domains, epitope tags, etc.). In some embodiments, the labeling group is coupled to the antigen binding protein via spacer arms of various lengths to reduce potential steric hindrance. Various methods for labeling proteins are known in the art.

[0206] Specific labels include optical dyes, including, but not limited to, chromophores, phosphors and fluorophores, with the latter being specific in many instances. Fluorophores can be either “small molecule” fluores, or proteinaceous fluores.

[0207] By “fluorescent label” is meant any molecule that can be detected via its inherent fluorescent properties. Suitable fluorescent labels include, but are not limited to, fluorescein, rhodamine, tetramethylrhodamine, cosin, erythrosin, coumarin, methyl-coumarins, pyrene, Malacite green, stilbene, Lucifer Yellow, Cascade Blue, Texas Red. IAEDANS, EDANS, BODIPY FL, LC Red 640, Cy 5, Cy 5.5, LC Red 705, Oregon green, the Alexa-Fluor dyes (Alexa Fluor 350, Alexa Fluor 430, Alexa Fluor 488, Alexa Fluor 546, Alexa Fluor 568, Alexa Fluor 594, Alexa Fluor 633, Alexa Fluor 647, Alexa Fluor 660, Alexa Fluor 680). Cascade Blue, Cascade Yellow and R-phycoerythrin (PE) (Molecular Probes, Eugene, Oreg.), FITC, Rhodamine, and Texas Red (Pierce, Rockford, Ill.), Cy5, Cy5.5, Cy7 (Amersham Life Science, Pittsburgh, Pa.). Suitable optical dyes, including fluorophores, are described in Molecular Probes Handbook by Richard P. Haugland and in subsequent editions, including Molecular Probes Handbook, A Guide to Fluorescent Probes and Labeling Technologies, 11^{th} edition, Johnson and Spence (eds), hereby expressly incorporated by reference.

[0208] Suitable proteinaceous fluorescent labels also include, but are not limited to, green fluorescent protein, including a Renilla, Ptilosarcus, or Aequorea species of GFP (Chalfie et al., (1994) Science 263:802-805), eGFP (Clontech Labs., Inc., Genbank Accession Number U55762), blue fluorescent protein (BFP, Quantum Biotechnologies, Inc., Quebec, Canada; Stauber, (1998) Biotechniques 24:462-71; Heim et al., (1996) Curr. Biol. 6:178-82), enhanced yellow fluorescent protein (EYFP, Clontech Labs., Inc.), luciferase (Ichiki et al., (1993) J. Immunol. 150:5408-17), β-galactosidase (Nolan et al., (1988) Proc. Natl. Acad. Sci. U.S.A. 85:2603-07) and Renilla (WO92/15673, WO95/07463, WO98/14605, WO98/26277, WO99/49019, U.S. Pat. Nos. 5,292,658, 5,418,155, 5,683,888, 5,741,668, 5,777,079, 5,804,387, 5,874,304, 5,876,995 and 5,925,558).

### Preparing of Antigen Binding Proteins

[0209] Non-human antibodies that are provided can be, for example, derived from any antibody-producing animal, such as a mouse, rat, rabbit, goat, donkey, or non-human primate (such as a monkey, (e.g., cynomolgus or rhesus monkey) or an ape (e.g., chimpanzee)). Non-human antibodies can be used, for instance, in in vitro cell culture and cell-culture based applications, or any other application where an immune response to the antibody does not occur or is insignificant, can be prevented, is not a concern, or is desired. In certain embodiments, the antibodies can be produced by immunizing with recombinant self-cleaved, mature, secreted PCSK9 comprising amino acids 31 to 692 of the amino acid sequence of SEQ ID NO: 2; or with full-length PCSK9; or with whole cells expressing PCSK9; or with membranes prepared from cells expressing PCSK9; or with fusion proteins, e.g., Fc fusions comprising PCSK9 (or extracellular domains thereof) fused to Fc, and other methods known in the art, e.g., as described in the Examples presented herein. Alternatively, the certain non-human antibodies can be raised by immunizing with amino acids which are segments PCSK9 that form part of the epitope to which certain antibodies provided herein bind. The antibodies can be polyclonal, monoclonal, or can be synthesized in host cells by expressing recombinant DNA.

[0210] Fully human antibodies can be prepared as described above by immunizing transgenic animals containing human immunoglobulin loci or by selecting a phage display library that is expressing a repertoire of human antibodies.

[0211] The monoclonal antibodies (mAbs) can be produced by a variety of techniques, including conventional monoclonal antibody methodology, e.g., the standard somatic cell hybridization technique of Kohler & Milstein, (1975) Nature 256:495-97. Alternatively, other techniques for producing monoclonal antibodies can be employed, for example, the viral or oncogenic transformation of B-lymphocytes. One suitable animal system for preparing hybridomas is the murine system, which is a very well established procedure. Immunization protocols and techniques for isolation of immunized splenocytes for fusion are known in the art. For such procedures, B cells from immunized mice are fused with a suitable immortalized fusion partner, such as a murine myeloma cell line. If desired, rats or other mammals besides can be immunized instead of mice and B cells from such animals can be fused with the murine myeloma cell line to form hybridomas. Alternatively, a myeloma cell line from a source other than mouse can be used. Fusion procedures for making hybridomas also are well known. SLAM technology can also be employed in the production of antibodies.

[0212] The single chain antibodies that are provided can be formed by linking heavy and light chain variable domain (Fv region) fragments via an amino acid bridge (short peptide linker), resulting in a single polypeptide chain. Such single-chain Fvs (scFvs) can be prepared by fusing DNA encoding a peptide linker between DNAs encoding the two variable domain polypeptides (V_{L} and V_{H}). The resulting polypeptides can fold back on themselves to form antigen-binding monomers, or they can form multimers (e.g., dimers, trimers, or tetramers), depending on the length of a flexible linker between the two variable domains (Kortt et al., (1997) Prot. Eng. 10:423; Kortt et al., (2001) Biomol. Eng. 18:95-108). By combining different V_{L} and V_{H}-comprising polypeptides, one can form multimeric scFvs that bind to different epitopes (Kriangkum et al., (2001) Biomol. Eng. 18:31-40). Techniques developed for the production of single chain antibodies include those described in U.S. Pat. No. 4,946,778; Bird et al., (1988) Science 242:423-26; Huston et al., (1988) Proc. Natl. Acad. Sci. U.S.A. 85:5879-83; Ward et al., (1989) Nature 334:544-46, de Graaf et al., (2002) Methods Mol Biol. 178:379-387. Single chain antibodies derived from antibodies provided herein include, but are not limited to scFvs comprising the variable domain combinations of the heavy and light chain variable regions depicted in Table 2, or combinations of light and heavy chain variable domains which include the CDRs depicted in Tables 3-4 and 6-23.

[0213] Antibodies provided herein that are of one subclass can be changed to antibodies from a different subclass using subclass switching methods. Thus, IgG antibodies can be derived from an IgM antibody, for example, and vice versa. Such techniques allow the preparation of new antibodies that possess the antigen binding properties of a given antibody (the parent antibody), but also exhibit biological properties associated with an antibody isotype or subclass different from that of the parent antibody. Recombinant DNA techniques can be employed. Cloned DNA encoding particular antibody polypeptides can be employed in such procedures, e.g., DNA encoding the constant domain of an antibody of the desired isotype. See, e.g., Lantto et al., (2002) Methods Mol. Biol. 178:303-16.

[0214] Accordingly, the antibodies that are provided include those comprising, for example, the variable domain combinations described, supra., having a desired isotype (for example, IgA, IgG1, IgG2, IgG3, IgG4, IgE, and IgD) as well as Fab or F(ab′)₂ fragments thereof. Moreover, if an IgG4 is desired, it can also be desired to introduce a point mutation (e.g., a mutation from CPSCP to CPPCP (SEQ ID NOs 1828 and 1829, respectively, in order of appearance) in the hinge region as described in Bloom et al., (1997) Protein Science 6:407-15, incorporated by reference herein) to alleviate a tendency to form intra-H chain disulfide bonds that can lead to heterogeneity in the IgG4 antibodies.

[0215] Moreover, techniques for deriving antibodies having different properties (i.e., varying affinities for the antigen to which they bind) are also known. One such technique, referred to as chain shuffling, involves displaying immunoglobulin variable domain gene repertoires on the surface of filamentous bacteriophage, often referred to as phage display. Chain shuffling has been used to prepare high affinity antibodies to the hapten 2-phenyloxazol-5-one, as described by Marks et al., (1992) Nature Biotechnology 10:779-83.

[0216] Conservative modifications can be made to the heavy and light chain variable regions described in Table 2, or the CDRs described in Tables 3A and 3B, 4A and 4B (and corresponding modifications to the encoding nucleic acids) to produce an antigen binding protein having functional and biochemical characteristics. Methods for achieving such modifications are described herein.

[0217] Antigen binding proteins that specifically bind to PCSK9 can be further modified in various ways. For example, if they are to be used for therapeutic purposes, they can be conjugated with polyethylene glycol (PEGylated) to prolong the serum half-life or to enhance protein delivery. PEG can be attached directly to the antigen binding protein or it can be attached via a linker, such as a glycosidic linkage.

[0218] Alternatively, the V region of the subject antibodies or fragments thereof can be fused with the Fc region of a different antibody molecule. The Fc region used for this purpose can be modified so that it does not bind complement, thus reducing the likelihood of inducing cell lysis in the patient when the fusion protein is used as a therapeutic agent. In addition, the subject antibodies or functional fragments thereof can be conjugated with human serum albumin to enhance the serum half-life of the antibody or fragment thereof. Another useful fusion partner for the antigen binding proteins or fragments thereof is transthyretin (TTR). TTR has the capacity to form a tetramer, thus an antibody-TTR fusion protein can form a multivalent antibody which can increase its binding avidity.

[0219] Alternatively, substantial modifications in the functional and/or biochemical characteristics of the antigen binding proteins described herein can be achieved by creating substitutions in the amino acid sequence of the heavy and light chains that differ significantly in their effect on maintaining (a) the structure of the molecular backbone in the area of the substitution, for example, as a sheet or helical conformation, (b) the charge or hydrophobicity of the molecule at the target site, or (c) the bulkiness of the side chain. A “conservative amino acid substitution” can involve a substitution of a native amino acid residue with a nonnative residue that has little or no effect on the polarity or charge of the amino acid residue at that position. See, Table 8, supra. Furthermore, any native residue in the polypeptide can also be substituted with alanine, as has been previously described for alanine scanning mutagenesis.

[0220] Amino acid substitutions (whether conservative or non-conservative) of the subject antibodies can be implemented by those skilled in the art by applying routine techniques. Amino acid substitutions can be used to identify important residues of the antibodies provided herein, or to increase or decrease the affinity of these antibodies PCSK9 or for modifying the binding affinity of other antigen-binding proteins described herein.

### Methods of Expressing Antigen Binding Proteins

[0221] Expression systems and constructs in the form of plasmids, expression vectors, transcription or expression cassettes that comprise at least one polynucleotide as described above are also provided herein, as well host cells comprising such expression systems or constructs.

[0222] The antigen binding proteins provided herein can be prepared by any of a number of conventional techniques. For example, antigen binding proteins that specifically bind to PCSK9 can be produced by recombinant expression systems, using any technique known in the art. See, e.g., Monoclonal Antibodies, Hybridomas: A New Dimension in Biological Analyses, (Kennet et al., eds.) Plenum Press (1980) and subsequent editions; and Harlow & Lane, (1988) supra.

[0223] Antigen binding proteins can be expressed in hybridoma cell lines (e.g., in particular antibodies can be expressed in hybridomas) or in cell lines other than hybridomas. Expression constructs encoding the antibodies can be used to transform a mammalian, insect or microbial host cell. Transformation can be performed using any known method for introducing polynucleotides into a host cell, including, for example packaging the polynucleotide in a virus or bacteriophage and transducing a host cell with the construct by transfection procedures known in the art, as exemplified by U.S. Pat. Nos. 4,399,216; 4,912,040; 4,740,461; and 4,959,455. The optimal transformation procedure used will depend upon which type of host cell is being transformed. Methods for introduction of heterologous polynucleotides into mammalian cells are well known in the art and include, but are not limited to, dextran-mediated transfection, calcium phosphate precipitation, polybrene mediated transfection, protoplast fusion, electroporation, encapsulation of the polynucleotide(s) in liposomes, mixing nucleic acid with positively-charged lipids, and direct microinjection of the DNA into nuclei.

[0224] Recombinant expression constructs typically comprise a nucleic acid molecule encoding a polypeptide comprising one or more of the following: one or more CDRs provided herein; a light chain constant region; a light chain variable region; a heavy chain constant region (e.g., C_{H}1, C_{H}2 and/or C_{H}3); and/or another scaffold portion of an antigen binding protein. These nucleic acid sequences are inserted into an appropriate expression vector using standard ligation techniques. In one embodiment, the heavy or light chain constant region is appended to the C-terminus of the anti-PCSK9 specific heavy or light chain variable region and is ligated into an expression vector. The vector is typically selected to be functional in the particular host cell employed (i.e., the vector is compatible with the host cell machinery, permitting amplification and/or expression of the gene can occur). In some embodiments, vectors are used that employ protein-fragment complementation assays using protein reporters, such as dihydrofolate reductase (see, for example, U.S. Pat. No. 6,270,964, which is hereby incorporated by reference). Suitable expression vectors can be purchased, for example, from Invitrogen Life Technologies or BD Biosciences. Other useful vectors for cloning and expressing the antibodies and fragments include those described in Bianchi and McGrew, (2003) Biotech. Biotechnol. Bioeng. 84:439-44, which is hereby incorporated by reference. Additional suitable expression vectors are discussed, for example, in “Gene Expression Technology,” Methods Enzymol., vol. 185, (Goeddel et al., ed.), (1990), Academic Press.

[0225] Typically, expression vectors used in any of the host cells will contain sequences for plasmid maintenance and for cloning and expression of exogenous nucleotide sequences. Such sequences, collectively referred to as “flanking sequences” in certain embodiments will typically include one or more of the following nucleotide sequences: a promoter, one or more enhancer sequences, an origin of replication, a transcriptional termination sequence, a complete intron sequence containing a donor and acceptor splice site, a sequence encoding a leader sequence for polypeptide secretion, a ribosome binding site, a polyadenylation sequence, a polylinker region for inserting the nucleic acid encoding the polypeptide to be expressed, and a selectable marker element.

[0226] Optionally, an expression vector can contain a “tag”-encoding sequence, i.e., an oligonucleotide molecule located at the 5′ or 3′ end of an antigen binding protein coding sequence; the oligonucleotide sequence encodes polyHis (such as hexaHis, HHHHHH (SEQ ID NO: 1830)), or another “tag” such as FLAG, HA (hemaglutinin influenza virus), or myc, for which commercially available antibodies exist. This tag is typically fused to the polypeptide upon expression of the polypeptide, and can serve as a means for affinity purification or detection of the antigen binding protein from the host cell. Affinity purification can be accomplished, for example, by column chromatography using antibodies against the tag as an affinity matrix. Optionally, the tag can subsequently be removed from the purified antigen binding protein by various means such as using certain peptidases for cleavage.

[0227] Flanking sequences can be homologous (i.e., from the same species and/or strain as the host cell), heterologous (i.e., from a species other than the host cell species or strain), hybrid (i.e., a combination of flanking sequences from more than one source), synthetic or native. As such, the source of a flanking sequence can be any prokaryotic or eukaryotic organism, any vertebrate or invertebrate organism, or any plant, provided that the flanking sequence is functional in, and can be activated by, the host cell machinery.

[0228] Flanking sequences useful in the vectors can be obtained by any of several methods well known in the art. Typically, flanking sequences useful herein will have been previously identified by mapping and/or by restriction endonuclease digestion and can thus be isolated from the proper tissue source using the appropriate restriction endonucleases. In some cases, the full nucleotide sequence of a flanking sequence can be known. Here, the flanking sequence can be synthesized using the methods described herein for nucleic acid synthesis or cloning.

[0229] Whether all or only a portion of the flanking sequence is known, it can be obtained using polymerase chain reaction (PCR) and/or by screening a genomic library with a suitable probe such as an oligonucleotide and/or flanking sequence fragment from the same or another species. Where the flanking sequence is not known, a fragment of DNA containing a flanking sequence can be isolated from a larger piece of DNA that can contain, for example, a coding sequence or even another gene or genes. Isolation can be accomplished by restriction endonuclease digestion to produce the proper DNA fragment followed by isolation using agarose gel purification, column chromatography or other methods known to the skilled artisan. The selection of suitable enzymes to accomplish this purpose will be readily apparent to one of ordinary skill in the art.

[0230] An origin of replication is typically a part of those prokaryotic expression vectors purchased commercially, and the origin aids in the amplification of the vector in a host cell. If the vector of choice does not contain an origin of replication site, one can be chemically synthesized based on a known sequence, and ligated into the vector. For example, the origin of replication from the plasmid pBR322 (GenBank Accession #J01749, New England Biolabs, Beverly, Mass.) is suitable for most gram-negative bacteria, and various viral origins (e.g., SV40, polyoma, adenovirus, vesicular stomatitus virus (VSV), or papillomaviruses such as HPV or BPV) are useful for cloning vectors in mammalian cells. Generally, the origin of replication component is not needed for mammalian expression vectors (for example, the SV40 origin is often used only because it also contains the virus early promoter).

[0231] A transcription termination sequence is typically located 3′ to the end of a polypeptide coding region and serves to terminate transcription. Usually, a transcription termination sequence in prokaryotic cells is a G-C rich fragment followed by a poly-T sequence. While the sequence is easily cloned from a library or even purchased commercially as part of a vector, it can also be readily synthesized using methods for nucleic acid synthesis such as those described herein.

[0232] A selectable marker gene encodes a protein necessary for the survival and growth of a host cell grown in a selective culture medium. Typical selection marker genes encode proteins that (a) confer resistance to antibiotics or other toxins, e.g., ampicillin, tetracycline, or kanamycin for prokaryotic host cells; (b) complement auxotrophic deficiencies of the cell; or (c) supply critical nutrients not available from complex or defined media. Specific selectable markers are the kanamycin resistance gene, the ampicillin resistance gene, and the tetracycline resistance gene. Advantageously, a neomycin resistance gene can also be used for selection in both prokaryotic and eukaryotic host cells.

[0233] Other selectable genes can be used to amplify the gene that will be expressed. Amplification is the process wherein genes that are required for production of a protein critical for growth or cell survival are reiterated in tandem within the chromosomes of successive generations of recombinant cells. Examples of suitable selectable markers for mammalian cells include dihydrofolate reductase (DHFR) and promoterless thymidine kinase genes. Mammalian cell transformants are placed under selection pressure wherein only the transformants are uniquely adapted to survive by virtue of the selectable gene present in the vector. Selection pressure is imposed by culturing the transformed cells under conditions in which the concentration of selection agent in the medium is successively increased, thereby leading to the amplification of both the selectable gene and the DNA that encodes another gene, such as an antigen binding protein that binds to PCSK9. As a result, increased quantities of a polypeptide such as an antigen binding protein are synthesized from the amplified DNA.

[0234] A ribosome-binding site is usually necessary for translation initiation of mRNA and is characterized by a Shine-Dalgarno sequence (prokaryotes) or a Kozak sequence (eukaryotes). The element is typically located 3′ to the promoter and 5′ to the coding sequence of the polypeptide to be expressed.

[0235] In some cases, such as where glycosylation is desired in a eukaryotic host cell expression system, one can manipulate the various pre- or pro-sequences to improve glycosylation or yield. For example, one can alter the peptidase cleavage site of a particular signal peptide, or add prosequences, which also can affect glycosylation. The final protein product can have, in the −1 position (relative to the first amino acid of the mature protein), one or more additional amino acids incident to expression, which may not have been totally removed. For example, the final protein product can have one or two amino acid residues found in the peptidase cleavage site, attached to the amino-terminus. Alternatively, use of some enzyme cleavage sites can result in a slightly truncated form of the desired polypeptide, if the enzyme cuts at such area within the mature polypeptide.

[0236] Expression and cloning will typically contain a promoter that is recognized by the host organism and operably linked to the molecule encoding an antigen binding protein that specifically binds to PCSK9 Promoters are untranscribed sequences located upstream (i.e., 5′) to the start codon of a structural gene (generally within about 100 to 1000 bp) that control transcription of the structural gene. Promoters are conventionally grouped into one of two classes: inducible promoters and constitutive promoters. Inducible promoters initiate increased levels of transcription from DNA under their control in response to some change in culture conditions, such as the presence or absence of a nutrient or a change in temperature. Constitutive promoters, on the other hand, uniformly transcribe a gene to which they are operably linked, that is, with little or no control over gene expression. A large number of promoters, recognized by a variety of potential host cells, are well known. A suitable promoter is operably linked to the DNA encoding heavy chain or light chain comprising an antigen binding protein by removing the promoter from the source DNA by restriction enzyme digestion and inserting the desired promoter sequence into the vector.

[0237] Suitable promoters for use with yeast hosts are also well known in the art. Yeast enhancers are advantageously used with yeast promoters. Suitable promoters for use with mammalian host cells are well known and include, but are not limited to, those obtained from the genomes of viruses such as polyoma virus, fowlpox virus, adenovirus (such as Adenovirus 2), bovine papilloma virus, avian sarcoma virus, cytomegalovirus, retroviruses, hepatitis-B virus, and Simian Virus 40 (SV40). Other suitable mammalian promoters include heterologous mammalian promoters, for example, heat-shock promoters and the actin promoter.

[0238] Additional promoters which can be of interest include, but are not limited to: SV40 early promoter (Benoist & Chambon, (1981) Nature 290:304-310); CMV promoter (Thornsen et al., (1984) Proc. Natl. Acad. U.S.A. 81:659-663); the promoter contained in the 3′ long terminal repeat of Rous sarcoma virus (Yamamoto et al., (1980) Cell 22:787-97); herpes thymidine kinase promoter (Wagner et al., (1981) Proc. Natl. Acad. Sci. U.S.A. 78:1444-45); promoter and regulatory sequences from the metallothionine gene (Prinster et al., (1982) Nature 296:39-42); and prokaryotic promoters such as the beta-lactamase promoter (Villa-Kamaroff et al., (1978) Proc. Natl. Acad. Sci. U.S.A. 75:3727-31); or the tac promoter (DeBoer et al., (1983) Proc. Natl. Acad. Sci. U.S.A. 80:21-25). Also of interest are the following animal transcriptional control regions, which exhibit tissue specificity and have been utilized in transgenic animals: the elastase I gene control region that is active in pancreatic acinar cells (Swift et al., (1984) Cell 38:639-46; Omitz et al., (1986) Cold Spring Harbor Synp. Quant. Biol. 50:399-409; MacDonald, (1987) Hepatology 7:425-515); the insulin gene control region that is active in pancreatic beta cells (Hanahan, (1985) Nature 315:115-22); the immunoglobulin gene control region that is active in lymphoid cells (Grosschedl et al., (1984) Cell 38:647-58; Adames et al., (1985) Nature 318:533-38; Alexander et al., (1987) Mol. Cell. Biol. 7:1436-44); the mouse mammary tumor virus control region that is active in testicular, breast, lymphoid and mast cells (Leder et al., (1986) Cell 45:485-95); the albumin gene control region that is active in liver (Pinkert et al., (1987) Genes and Devel. 1:268-76); the alpha-feto-protein gene control region that is active in liver (Krumlauf et al., (1985) Mol. Cell. Biol. 5:1639-48; Hammer et al., (1987) Science 253:53-58); the alpha 1-antitrypsin gene control region that is active in liver (Kelsey et al., (1987) Genes and Devel. 1:161-71); the beta-globin gene control region that is active in myeloid cells (Mogram et al., (1985) Nature 315:338-40; Kollias et al., (1986) Cell 46:89-94); the myelin basic protein gene control region that is active in oligodendrocyte cells in the brain (Readhead et al., (1987) Cell 48:703-12); the myosin light chain-2 gene control region that is active in skeletal muscle (Sani, (1985) Nature 314:283-86); and the gonadotropic releasing hormone gene control region that is active in the hypothalamus (Mason et al., (1986) Science 234:1372-78).

[0239] An enhancer sequence can be inserted into the vector to increase transcription of DNA encoding light chain or heavy chain comprising an antigen binding protein that specifically binds to PCSK9 by higher eukaryotes, e.g., a human antigen binding protein that specifically binds to PCSK9. Enhancers are cis-acting elements of DNA, usually about 10-300 bp in length, that act on the promoter to increase transcription. Enhancers are relatively orientation and position independent, having been found at positions both 5′ and 3′ to the transcription unit. Several enhancer sequences available from mammalian genes are known (e.g., globin, elastase, albumin, alpha-feto-protein and insulin). Typically, however, an enhancer from a virus is used. The SV40 enhancer, the cytomegalovirus early promoter enhancer, the polyoma enhancer, and adenovirus enhancers known in the art are exemplary enhancing elements for the activation of eukaryotic promoters. While an enhancer can be positioned in the vector either 5′ or 3′ to a coding sequence, it is typically located at a site 5′ from the promoter. A sequence encoding an appropriate native or heterologous signal sequence (leader sequence or signal peptide) can be incorporated into an expression vector, to promote extracellular secretion of the antibody. The choice of signal peptide or leader depends on the type of host cells in which the antibody is to be produced, and a heterologous signal sequence can replace the native signal sequence. Examples of signal peptides that are functional in mammalian host cells include the following: the signal sequence for interleukin-7 (IL-7) described in U.S. Pat. No. 4,965,195; the signal sequence for interleukin-2 receptor described in Cosman et al., (1984) Nature 312:768-71; the interleukin-4 receptor signal peptide described in EP Patent No. 0367 566; the type I interleukin-1 receptor signal peptide described in U.S. Pat. No. 4,968,607; the type II interleukin-1 receptor signal peptide described in EP Patent No. 0 460 846.

[0240] Expression vectors can be constructed from a starting vector such as a commercially available vector. Such vectors can but need not contain all of the desired flanking sequences. Where one or more of the flanking sequences are not already present in the vector, they can be individually obtained and ligated into the vector. Methods used for obtaining each of the flanking sequences are well known to one skilled in the art.

[0241] After the vector has been constructed and a nucleic acid molecule encoding light chain, a heavy chain, or a light chain and a heavy chain comprising an antigen binding protein that specifically binds to PCSK9 has been inserted into the proper site of the vector, the completed vector can be inserted into a suitable host cell for amplification and/or polypeptide expression. The transformation of an expression vector for an antigen binding protein into a selected host cell can be accomplished by well known methods including transfection, infection, calcium phosphate co-precipitation, electroporation, microinjection, lipofection, DEAE-dextran mediated transfection, or other known techniques. The method selected will in part be a function of the type of host cell to be used. These methods and other suitable methods are well known to the skilled artisan, and are set forth, for example, in Sambrook et al., (2001), supra.

[0242] A host cell, when cultured under appropriate conditions, synthesizes an antigen binding protein that can subsequently be collected from the culture medium (if the host cell secretes it into the medium) or directly from the host cell producing it (if it is not secreted). The selection of an appropriate host cell will depend upon various factors, such as desired expression levels, polypeptide modifications that are desirable or necessary for activity (such as glycosylation or phosphorylation) and ease of folding into a biologically active molecule.

[0243] Mammalian cell lines available as hosts for expression are well known in the art and include, but are not limited to, immortalized cell lines available from the American Type Culture Collection (ATCC), including but not limited to HeLa cells. Human Embryonic Kidney 293 cells (HEK293 cells), Chinese hamster ovary (CHO) cells, HeLa cells, baby hamster kidney (BHK) cells, monkey kidney cells (COS), human hepatocellular carcinoma cells (e.g., Hep G2), and a number of other cell lines. In certain embodiments, cell lines can be selected through determining which cell lines have high expression levels and constitutively produce antigen binding proteins with desirable binding properties (e.g., the ability to bind PCSK9). In another embodiment, a cell line from the B cell lineage that does not make its own antibody but has a capacity to make and secrete a heterologous antibody can be selected. The ability to inhibit PCSK9 binding to LDLR can also form a selection criterion.

### Uses of Antigen Binding Proteins for Diagnostic and Therapeutic Purposes

[0244] In certain instances, PCSK9 activity correlates with a number of human disease states. For example, in certain instances, too much PCSK9 activity correlates with certain conditions, such as hypercholesterolemia. Therefore, in certain instances, modulating PCSK9 activity can be therapeutically useful. In certain embodiments, a neutralizing antigen binding protein to PCSK9 is used to modulate at least one PCSK9 activity (e.g., binding to LDLR). Such methods can treat and/or prevent and/or reduce the risk of disorders that relate to elevated serum cholesterol levels or in which elevated cholesterol levels are relevant.

[0245] As will be appreciated by one of skill in the art, in light of the present disclosure, disorders that relate to, involve, or can be influenced by varied cholesterol, LDL, or LDLR levels can be addressed by various embodiments of the antigen binding proteins. In some embodiments, a “cholesterol related disorder” (which includes “serum cholesterol related disorders”) includes any one or more of the following: hypercholesterolemia, heart disease, metabolic syndrome, diabetes, coronary heart disease, stroke, cardiovascular diseases, Alzheimer's disease and generally dyslipidemias, which can be manifested, for example, by an elevated total serum cholesterol, elevated LDL, elevated triglycerides, elevated VLDL, and/or low HDL. Some non-limiting examples of primary and secondary dyslipidemias that can be treated using an ABP, either alone, or in combination with one or more other agents include the metabolic syndrome, diabetes mellitus, familial combined hyperlipidemia, familial hypertriglyceridemia, familial hypercholesterolemias, including heterozygous hypercholesterolemia, homozygous hypercholesterolemia, familial defective apolipoprotein B-100; polygenic hypercholesterolemia; remnant removal disease, hepatic lipase deficiency; dyslipidemia secondary to any of the following: dietary indiscretion, hypothyroidism, drugs including estrogen and progestin therapy, beta-blockers, and thiazide diuretics; nephrotic syndrome, chronic renal failure, Cushing's syndrome, primary biliary cirrhosis, glycogen storage diseases, hepatoma, cholestasis, acromegaly, insulinoma, isolated growth hormone deficiency, and alcohol-induced hypertriglyceridemia. ABP can also be useful in preventing or treating atherosclerotic diseases, such as, for example, coronary heart disease, coronary artery disease, peripheral arterial disease, stroke (ischaemic and hemorrhagic), angina pectoris, or cerebrovascular disease and acute coronary syndrome, myocardial infarction. In some embodiments, the ABP is useful in reducing the risk of: nonfatal heart attacks, fatal and non-fatal strokes, certain types of heart surgery, hospitalization for heart failure, chest pain in patients with heart disease, and/or cardiovascular events because of established heart disease such as prior heart attack, prior heart surgery, and/or chest pain with evidence of clogged arteries. In some embodiments, the ABP and methods can be used to reduce the risk of recurrent cardiovascular events.

[0246] As will be appreciated by one of skill in the art, diseases or disorders that are generally addressable (either treatable or preventable) through the use of statins can also benefit from the application of the instant antigen binding proteins. In addition, in some embodiments, disorders or disease that can benefit from the prevention of cholesterol synthesis or increased LDLR expression can also be treated by various embodiments of the antigen binding proteins. In addition, as will be appreciated by one of skill in the art, the use of the anti-PCSK9 antibodies can be especially useful in the treatment of diabetes. Not only is diabetes a risk factor for coronary heart disease, but insulin increases the expression of PCSK9. That is, people with diabetes have elevated plasma lipid levels (which can be related to high PCSK9 levels) and can benefit from lowering those levels. This is generally discussed in more detail in Costet et al. (“Hepatic PCSK9 Expression is Regulated by Nutritional Status via Insulin and Sterol Regulatory Element-binding Protein 1C”, J. Biol. Chem., 281: 6211-6218, 2006), the entirety of which is incorporated herein by reference.

[0247] In some embodiments, the antigen binding protein is administered to those who have diabetes mellitus, abdominal aortic aneurysm, atherosclerosis and/or peripheral vascular disease in order to decrease their serum cholesterol levels to a safer range. In some embodiments, the antigen binding protein is administered to patients at risk of developing any of the herein described disorders. In some embodiments, the ABPs are administered to subjects that smoke, have hypertension or a familial history of early heart attacks.

[0248] In some embodiments, a subject is administered an ABP if they are at a moderate risk or higher on the 2004 NCEP treatment goals. In some embodiments, the ABP is administered to a subject if the subject's LDL cholesterol level is greater than 160 mg/dl. In some embodiments, the ABP is administered if the subjects LDL cholesterol level is greater than 130 (and they have a moderate or moderately high risk according to the 2004 NCEP treatment goals). In some embodiments, the ABP is administered if the subjects LDL cholesterol level is greater than 100 (and they have a high or very high risk according to the 2004 NCEP treatment goals).

[0249] A physician will be able to select an appropriate treatment indications and target lipid levels depending on the individual profile of a particular patient. One well-accepted standard for guiding treatment of hyperlipidemia is the Third Report of the National Cholesterol Education Program (NCEP) Expert Panel on Detection, Evaluation, and Treatment of the High Blood Cholesterol in Adults (Adult Treatment Panel III) Final Report, National Institutes of Health, NIH Publication No. 02-5215 (2002), the printed publication of which is hereby incorporated by reference in its entirety.

[0250] In some embodiments, antigen binding proteins to PCSK9 are used to decrease the amount of PCSK9 activity from an abnormally high level or even a normal level. In some embodiments, antigen binding proteins to PCSK9 are used to treat or prevent hypercholesterolemia and/or in the preparation of medicaments therefore and/or for other cholesterol related disorders (such as those noted herein). In certain embodiments, an antigen binding protein to PCSK9 is used to treat or prevent conditions such as hypercholesterolemia in which PCSK9 activity is normal. In such conditions, for example, reduction of PCSK9 activity to below normal can provide a therapeutic effect.

[0251] In some embodiments, more than one antigen binding protein to PCSK9 is used to modulate PCSK9 activity.

[0252] In certain embodiments, methods are provided of treating a cholesterol related disorder, such as hypercholesterolemia comprising administering a therapeutically effective amount of one or more antigen binding proteins to PCSK9 and another therapeutic agent.

[0253] In certain embodiments, an antigen binding protein to PCSK9 is administered alone. In certain embodiments, an antigen binding protein to PCSK9 is administered prior to the administration of at least one other therapeutic agent. In certain embodiments, an antigen binding protein to PCSK9 is administered concurrent with the administration of at least one other therapeutic agent. In certain embodiments, an antigen binding protein to PCSK9 is administered subsequent to the administration of at least one other therapeutic agent. In other embodiments, an antigen binding protein to PCSK9 is administered prior to the administration of at least one other therapeutic agent. Therapeutic agents (apart from the antigen binding protein), include, but are not limited to, at least one other cholesterol-lowering (serum and/or total body cholesterol) agent or an agent. In some embodiments, the agent increases the expression of LDLR, have been observed to increase serum HDL levels, lower LDL levels or lower triglyceride levels. Exemplary therapeutic agents include, but are not limited to, statins (atorvastatin, cerivastatin, fluvastatin, lovastatin, mevastatin, pitavastatin, pravastatin, rosuvastatin, simvastatin), Nicotinic acid (Niacin) (NIACOR, Niaspan (slow release niacin), Slo-Niacin (slow release niacin)), Fibric acid (Lopid (Gemfibrozil), Tricor (fenofibrate), Bile acid sequestrants (Questran (cholestyramine), colesevelam (Welchol), Colestid (colestipol)), Cholesterol absorption inhibitors (Zetia (ezetimibe)), Combining nicotinic acid with statin (Advicor (lovastatin and niaspan), Combining a statin with an absorption inhibitor (Vytorin (Zocor and Zetia) and/or lipid modifying agents. In some embodiments, the ABP is combined with PPAR gamma agonsits, PPAR alpha/gamma agonists, squalene synthase inhibitors, CETP inhibitors, anti-hypertensives, anti-diabetic agents (such as sulphonyl ureas, insulin, GLP-1 analogs, DDPIV inhibitors), ApoB modulators, MTP inhibitors and/or arteriosclerosis obliterans treatments. In some embodiments, the ABP is combined with an agent that increases the level of LDLR protein in a subject, such as statins, certain cytokines like oncostatin M, estrogen, and/or certain herbal ingredients such as berberine. In some embodiments, the ABP is combined with an agent that increases serum cholesterol levels in a subject (such as certain anti-psycotic agents, certain HIV protease inhibitors, dietary factors such as high fructose, sucrose, cholesterol or certain fatty acids and certain nuclear receptor agonists and antagonists for RXR, RAR, LXR. FXR). In some embodiments, the ABP is combined with an agent that increases the level of PCSK9 in a subject, such as statins and/or insulin. The combination of the two can allow for the undesirable side-effects of other agents to be mitigated by the ABP. As will be appreciated by one of skill in the art, in some embodiments, the ABP is combined with the other agent/compound. In some embodiments, the ABP and other agent are administered concurrently. In some embodiments, the ABP and other agent are not administered simultaneously, with the ABP being administered before or after the agent is administered. In some embodiments, the subject receives both the ABP and the other agent (that increases the level of LDLR) during a same period of prevention, occurrence of a disorder, and/or period of treatment.

[0254] Pharmaceutical compositions of the invention can be administered in combination therapy, i.e., combined with other agents. In certain embodiments, the combination therapy comprises an antigen binding protein capable of binding PCSK9, in combination with at least one anti-cholesterol agent. Agents include, but are not limited to, in vitro synthetically prepared chemical compositions, antibodies, antigen binding regions, and combinations and conjugates thereof. In certain embodiments, an agent can act as an agonist, antagonist, allosteric modulator, or toxin. In certain embodiments, an agent can act to inhibit or stimulate its target (e.g., receptor or enzyme activation or inhibition), and thereby promote increased expression of LDLR or decrease serum cholesterol levels.

[0255] In certain embodiments, an antigen binding protein to PCSK9 can be administered prior to, concurrent with, and subsequent to treatment with a cholesterol-lowering (serum and/or total cholesterol) agent. In certain embodiments, an antigen binding protein to PCSK9 can be administered prophylactially to prevent or mitigate the onset of hypercholesterolemia, heart disease, diabetes, and/or any of the cholesterol related disorder. In certain embodiments, an antigen binding protein to PCSK9 can be administered for the treatment of an existing hypercholesterolemia condition. In some embodiments, the ABP delays the onset of the disorder and/or symptoms associated with the disorder. In some embodiments, the ABP is provided to a subject lacking any symptoms of any one of the cholesterol related disorders or a subset thereof.

[0256] In certain embodiments, an antigen binding protein to PCSK9 is used with particular therapeutic agents to treat various cholesterol related disorders, such as hypercholesterolemia. In certain embodiments, in view of the condition and the desired level of treatment, two, three, or more agents can be administered. In certain embodiments, such agents can be provided together by inclusion in the same formulation. In certain embodiments, such agent(s) and an antigen binding protein to PCSK9 can be provided together by inclusion in the same formulation. In certain embodiments, such agents can be formulated separately and provided together by inclusion in a treatment kit. In certain embodiments, such agents and an antigen binding protein to PCSK9 can be formulated separately and provided together by inclusion in a treatment kit. In certain embodiments, such agents can be provided separately. In certain embodiments, when administered by gene therapy, the genes encoding protein agents and/or an antigen binding protein to PCSK9 can be included in the same vector. In certain embodiments, the genes encoding protein agents and/or an antigen binding protein to PCSK9 can be under the control of the same promoter region. In certain embodiments, the genes encoding protein agents and/or an antigen binding protein to PCSK9 can be in separate vectors.

[0257] In certain embodiments, the invention provides for pharmaceutical compositions comprising an antigen binding protein to PCSK9 together with a pharmaceutically acceptable diluent, carrier, solubilizer, emulsifier, preservative and/or adjuvant.

[0258] In certain embodiments, the invention provides for pharmaceutical compositions comprising an antigen binding protein to PCSK9 and a therapeutically effective amount of at least one additional therapeutic agent, together with a pharmaceutically acceptable diluent, carrier, solubilizer, emulsifier, preservative and/or adjuvant.

[0259] In certain embodiments, an antigen binding protein to PCSK9 can be used with at least one therapeutic agent for inflammation. In certain embodiments, an antigen binding protein to PCSK9 can be used with at least one therapeutic agent for an immune disorder. Exemplary therapeutic agents for inflammation and immune disorders include, but are not limited to cyclooxygenase type 1 (COX-1) and cyclooxygenase type 2 (COX-2) inhibitors small molecule modulators of 38 kDa mitogen-activated protein kinase (p38-MAPK); small molecule modulators of intracellular molecules involved in inflammation pathways, wherein such intracellular molecules include, but are not limited to, jnk, IKK, NF-κB, ZAP70, and lck. Certain exemplary therapeutic agents for inflammation are described, e.g., in C. A. Dinarello & L. L. Moldawer Proinflammatory and Anti-Inflammatory Cytokines in Rheumatoid Arthritis: A Primer for Clinicians Third Edition (2001) Amgen Inc. Thousand Oaks, Calif.

[0260] In certain embodiments, pharmaceutical compositions will include more than one different antigen binding protein to PCSK9. In certain embodiments, pharmaceutical compositions will include more than one antigen binding protein to PCSK9 wherein the antigen binding proteins to PCSK9 bind more than one epitope. In some embodiments, the various antigen binding proteins will not compete with one another for binding to PCSK9. In some embodiments, any of the antigen binding proteins depicted in Table 2 and FIGS. 2 and/or 3 can be combined together in a pharmaceutical composition.

[0261] In certain embodiments, acceptable formulation materials preferably are nontoxic to recipients at the dosages and concentrations employed. In some embodiments, the formulation material(s) are for s.c. and/or I.V. administration. In certain embodiments, the pharmaceutical composition can contain formulation materials for modifying, maintaining or preserving, for example, the pH, osmolarity, viscosity, clarity, color, isotonicity, odor, sterility, stability, rate of dissolution or release, adsorption or penetration of the composition. In certain embodiments, suitable formulation materials include, but are not limited to, amino acids (such as glycine, glutamine, asparagine, arginine or lysine); antimicrobials; antioxidants (such as ascorbic acid, sodium sulfite or sodium hydrogen-sulfite); buffers (such as borate, bicarbonate, Tris-HCl, citrates, phosphates or other organic acids); bulking agents (such as mannitol or glycine); chelating agents (such as ethylenediamine tetraacetic acid (EDTA)); complexing agents (such as caffeine, polyvinylpyrrolidone, beta-cyclodextrin or hydroxypropyl-beta-cyclodextrin); fillers; monosaccharides; disaccharides; and other carbohydrates (such as glucose, mannose or dextrins); proteins (such as serum albumin, gelatin or immunoglobulins); coloring, flavoring and diluting agents; emulsifying agents; hydrophilic polymers (such as polyvinylpyrrolidone); low molecular weight polypeptides; salt-forming counterions (such as sodium); preservatives (such as benzalkonium chloride, benzoic acid, salicylic acid, thimerosal, phenethyl alcohol, methylparaben, propylparaben, chlorhexidine, sorbic acid or hydrogen peroxide); solvents (such as glycerin, propylene glycol or polyethylene glycol); sugar alcohols (such as mannitol or sorbitol); suspending agents; surfactants or wetting agents (such as pluronics, PEG, sorbitan esters, polysorbates such as polysorbate 20, polysorbate 80, triton, tromethamine, lecithin, cholesterol, tyloxapal); stability enhancing agents (such as sucrose or sorbitol); tonicity enhancing agents (such as alkali metal halides, preferably sodium or potassium chloride, mannitol sorbitol); delivery vehicles; diluents; excipients and/or pharmaceutical adjuvants. (Remington's Pharmaceutical Sciences, 18th Edition, A. R. Gennaro, ed., Mack Publishing Company (1995). In some embodiments, the formulation comprises PBS; 20 mM NaOAC, pH 5.2, 50 mM NaCl; and/or 10 mM NAOAC, pH 5.2, 9% Sucrose.

[0262] In certain embodiments, an antigen binding protein to PCSK9 and/or a therapeutic molecule is linked to a half-life extending vehicle known in the art. Such vehicles include, but are not limited to, polyethylene glycol, glycogen (e.g., glycosylation of the ABP), and dextran. Such vehicles are described, e.g., in U.S. application Ser. No. 09/428,082, now U.S. Pat. No. 6,660,843 and published PCT Application No. WO 99/25044, which are hereby incorporated by reference for any purpose.

[0263] In certain embodiments, the optimal pharmaceutical composition will be determined by one skilled in the art depending upon, for example, the intended route of administration, delivery format and desired dosage. See, for example, Remington's Pharmaceutical Sciences, supra. In certain embodiments, such compositions may influence the physical state, stability, rate of in vivo release and rate of in vivo clearance of the antibodies of the invention.

[0264] In certain embodiments, the primary vehicle or carrier in a pharmaceutical composition can be either aqueous or non-aqueous in nature. For example, in certain embodiments, a suitable vehicle or carrier can be water for injection, physiological saline solution or artificial cerebrospinal fluid, possibly supplemented with other materials common in compositions for parenteral administration. In some embodiments, the saline comprises isotonic phosphate-buffered saline. In certain embodiments, neutral buffered saline or saline mixed with serum albumin are further exemplary vehicles. In certain embodiments, a composition comprising an antigen binding protein to PCSK9, with or without at least one additional therapeutic agents, can be prepared for storage by mixing the selected composition having the desired degree of purity with optional formulation agents (Remington's Pharmaceutical Sciences, supra) in the form of a lyophilized cake or an aqueous solution. Further, in certain embodiments, a composition comprising an antigen binding protein to PCSK9, with or without at least one additional therapeutic agents, can be formulated as a lyophilizate using appropriate excipients such as sucrose.

[0265] In certain embodiments, the pharmaceutical composition can be selected for parenteral delivery. In certain embodiments, the compositions can be selected for inhalation or for delivery through the digestive tract, such as orally. The preparation of such pharmaceutically acceptable compositions is within the ability of one skilled in the art.

[0266] In certain embodiments, the formulation components are present in concentrations that are acceptable to the site of administration. In certain embodiments, buffers are used to maintain the composition at physiological pH or at a slightly lower pH, typically within a pH range of from about 5 to about 8.

[0267] In certain embodiments, when parenteral administration is contemplated, a therapeutic composition can be in the form of a pyrogen-free, parenterally acceptable aqueous solution comprising a desired antigen binding protein to PCSK9, with or without additional therapeutic agents, in a pharmaceutically acceptable vehicle. In certain embodiments, a vehicle for parenteral injection is sterile distilled water in which an antigen binding protein to PCSK9, with or without at least one additional therapeutic agent, is formulated as a sterile, isotonic solution, properly preserved. In certain embodiments, the preparation can involve the formulation of the desired molecule with an agent, such as injectable microspheres, bio-erodible particles, polymeric compounds (such as polylactic acid or polyglycolic acid), beads or liposomes, that can provide for the controlled or sustained release of the product which can then be delivered via a depot injection. In certain embodiments, hyaluronic acid can also be used, and can have the effect of promoting sustained duration in the circulation. In certain embodiments, implantable drug delivery devices can be used to introduce the desired molecule.

[0268] In certain embodiments, a pharmaceutical composition can be formulated for inhalation. In certain embodiments, an antigen binding protein to PCSK9, with or without at least one additional therapeutic agent, can be formulated as a dry powder for inhalation. In certain embodiments, an inhalation solution comprising an antigen binding protein to PCSK9, with or without at least one additional therapeutic agent, can be formulated with a propellant for aerosol delivery. In certain embodiments, solutions can be nebulized. Pulmonary administration is further described in PCT application no. PCT/US94/001875, which describes pulmonary delivery of chemically modified proteins.

[0269] In certain embodiments, it is contemplated that formulations can be administered orally. In certain embodiments, an antigen binding protein to PCSK9, with or without at least one additional therapeutic agents, that is administered in this fashion can be formulated with or without those carriers customarily used in the compounding of solid dosage forms such as tablets and capsules. In certain embodiments, a capsule can be designed to release the active portion of the formulation at the point in the gastrointestinal tract when bioavailability is maximized and pre-systemic degradation is minimized. In certain embodiments, at least one additional agent can be included to facilitate absorption of an antigen binding protein to PCSK9 and/or any additional therapeutic agents. In certain embodiments, diluents, flavorings, low melting point waxes, vegetable oils, lubricants, suspending agents, tablet disintegrating agents, and binders can also be employed.

[0270] In certain embodiments, a pharmaceutical composition can involve an effective quantity of an antigen binding protein to PCSK9, with or without at least one additional therapeutic agents, in a mixture with non-toxic excipients which are suitable for the manufacture of tablets. In certain embodiments, by dissolving the tablets in sterile water, or another appropriate vehicle, solutions can be prepared in unit-dose form. In certain embodiments, suitable excipients include, but are not limited to, inert diluents, such as calcium carbonate, sodium carbonate or bicarbonate, lactose, or calcium phosphate; or binding agents, such as starch, gelatin, or acacia; or lubricating agents such as magnesium stearate, stearic acid, or talc.

[0271] Additional pharmaceutical compositions will be evident to those skilled in the art, including formulations involving antigen binding proteins to PCSK9, with or without at least one additional therapeutic agent(s), in sustained- or controlled-delivery formulations. In certain embodiments, techniques for formulating a variety of other sustained- or controlled-delivery means, such as liposome carriers, bio-erodible microparticles or porous beads and depot injections, are also known to those skilled in the art. See for example, PCT Application No. PCT/US93/00829 which describes the controlled release of porous polymeric microparticles for the delivery of pharmaceutical compositions. In certain embodiments, sustained-release preparations can include semipermeable polymer matrices in the form of shaped articles, e.g. films, or microcapsules. Sustained release matrices can include polyesters, hydrogels, polylactides (U.S. Pat. No. 3,773,919 and EP 058,481), copolymers of L-glutamic acid and gamma ethyl-L-glutamate (Sidman et al., Biopolymers, 22:547-556 (1983)), poly (2-hydroxyethyl-methacrylate) (Langer et al., J. Biomed. Mater. Res., 15:167-277 (1981) and Langer, Chem. Tech., 12:98-105 (1982)), ethylene vinyl acetate (Langer et al., supra) or poly-D(−)-3-hydroxybutyric acid (EP 133,988). In certain embodiments, sustained release compositions can also include liposomes, which can be prepared by any of several methods known in the art. See, e.g., Eppstein et al., Proc. Natl. Acad. Sci. USA, 82:3688-3692 (1985); EP 036,676; EP 088,046 and EP 143,949.

[0272] The pharmaceutical composition to be used for in vivo administration typically is sterile. In certain embodiments, this can be accomplished by filtration through sterile filtration membranes. In certain embodiments, where the composition is lyophilized, sterilization using this method can be conducted either prior to or following lyophilization and reconstitution. In certain embodiments, the composition for parenteral administration can be stored in lyophilized form or in a solution. In certain embodiments, parenteral compositions generally are placed into a container having a sterile access port, for example, an intravenous solution bag or vial having a stopper pierceable by a hypodermic injection needle.

[0273] In certain embodiments, once the pharmaceutical composition has been formulated, it can be stored in sterile vials as a solution, suspension, gel, emulsion, solid, or as a dehydrated or lyophilized powder. In certain embodiments, such formulations can be stored either in a ready-to-use form or in a form (e.g., lyophilized) that is reconstituted prior to administration.

[0274] In certain embodiments, kits are provided for producing a single-dose administration unit. In certain embodiments, the kit can contain both a first container having a dried protein and a second container having an aqueous formulation. In certain embodiments, kits containing single and multi-chambered pre-filled syringes (e.g., liquid syringes and lyosyringes) are included.

[0275] In certain embodiments, the effective amount of a pharmaceutical composition comprising an antigen binding protein to PCSK9, with or without at least one additional therapeutic agent, to be employed therapeutically will depend, for example, upon the therapeutic context and objectives. One skilled in the art will appreciate that the appropriate dosage levels for treatment, according to certain embodiments, will thus vary depending, in part, upon the molecule delivered, the indication for which an antigen binding protein to PCSK9, with or without at least one additional therapeutic agent, is being used, the route of administration, and the size (body weight, body surface or organ size) and/or condition (the age and general health) of the patient. In certain embodiments, the clinician can titer the dosage and modify the route of administration to obtain the optimal therapeutic effect. In certain embodiments, a typical dosage can range from about 0.1 μg/kg to up to about 100 mg/kg or more, depending on the factors mentioned above.

[0276] In certain embodiments, the frequency of dosing will take into account the pharmacokinetic parameters of an antigen binding protein to PCSK9 and/or any additional therapeutic agents in the formulation used. In certain embodiments, a clinician will administer the composition until a dosage is reached that achieves the desired effect. In certain embodiments, the composition can therefore be administered as a single dose, or as two or more doses (which may or may not contain the same amount of the desired molecule) over time, or as a continuous infusion via an implantation device or catheter. Further refinement of the appropriate dosage is routinely made by those of ordinary skill in the art and is within the ambit of tasks routinely performed by them. In certain embodiments, appropriate dosages can be ascertained through use of appropriate dose-response data. In some embodiments, the amount and frequency of administration can take into account the desired cholesterol level (serum and/or total) to be obtained and the subject's present cholesterol level, LDL level, and/or LDLR levels, all of which can be obtained by methods that are well known to those of skill in the art.

[0277] In certain embodiments, the route of administration of the pharmaceutical composition is in accord with known methods, e.g. orally, through injection by intravenous, intraperitoneal, intracerebral (intra-parenchymal), intracerebroventricular, intramuscular, subcutaneously, intra-ocular, intraarterial, intraportal, or intralesional routes; by sustained release systems or by implantation devices. In certain embodiments, the compositions can be administered by bolus injection or continuously by infusion, or by implantation device.

[0278] In certain embodiments, the composition can be administered locally via implantation of a membrane, sponge or another appropriate material onto which the desired molecule has been absorbed or encapsulated. In certain embodiments, where an implantation device is used, the device can be implanted into any suitable tissue or organ, and delivery of the desired molecule can be via diffusion, timed-release bolus, or continuous administration.

[0279] In certain embodiments, it can be desirable to use a pharmaceutical composition comprising an antigen binding protein to PCSK9, with or without at least one additional therapeutic agent, in an ex vivo manner. In such instances, cells, tissues and/or organs that have been removed from the patient are exposed to a pharmaceutical composition comprising an antigen binding protein to PCSK9, with or without at least one additional therapeutic agent, after which the cells, tissues and/or organs are subsequently implanted back into the patient.

[0280] In certain embodiments, an antigen binding protein to PCSK9 and/or any additional therapeutic agents can be delivered by implanting certain cells that have been genetically engineered, using methods such as those described herein, to express and secrete the polypeptides. In certain embodiments, such cells can be animal or human cells, and can be autologous, heterologous, or xenogeneic. In certain embodiments, the cells can be immortalized. In certain embodiments, in order to decrease the chance of an immunological response, the cells can be encapsulated to avoid infiltration of surrounding tissues. In certain embodiments, the encapsulation materials are typically biocompatible, semi-permeable polymeric enclosures or membranes that allow the release of the protein product(s) but prevent the destruction of the cells by the patient's immune system or by other detrimental factors from the surrounding tissues.

[0281] Based on the ability of ABPs to significantly neutralize PCSK9 □activity (as demonstrated in the Examples below), these ABPs will have therapeutic effects in treating and preventing symptoms and conditions resulting from PCSK9-mediated activity, such as hypercholesterolemia.

### Diagnostic Applications

[0282] In some embodiments, the ABP is used as a diagnostic tool. The ABP can be used to assay the amount of PCSK9 present in a sample and/or subject. As will be appreciated by one of skill in the art, such ABPs need not be neutralizing ABPs. In some embodiments, the diagnostic ABP is not a neutralizing ABP. In some embodiments, the diagnostic ABP binds to a different epitope than the neutralizing ABP binds to. In some embodiments, the two ABPs do not compete with one another.

[0283] In some embodiments, the ABPs disclosed herein are used or provided in an assay kit and/or method for the detection of PCSK9 in mammalian tissues or cells in order to screen/diagnose for a disease or disorder associated with changes in levels of PCSK9. The kit comprises an ABP that binds PCSK9 and means for indicating the binding of the ABP with PCSK9, if present, and optionally PCSK9 protein levels. Various means for indicating the presence of an ABP can be used. For example, fluorophores, other molecular probes, or enzymes can be linked to the ABP and the presence of the ABP can be observed in a variety of ways. The method for screening for such disorders can involve the use of the kit, or simply the use of one of the disclosed ABPs and the determination of whether the ABP binds to PCSK9 in a sample. As will be appreciated by one of skill in the art, high or elevated levels of PCSK9 will result in larger amounts of the ABP binding to PCSK9 in the sample. Thus, degree of ABP binding can be used to determine how much PCSK9 is in a sample. Subjects or samples with an amount of PCSK9 that is greater than a predetermined amount (e.g., an amount or range that a person without a PCSK9 related disorder would have) can be characterized as having a PCSK9 mediated disorder. In some embodiments, the ABP is administered to a subject taking a statin, in order to determine if the statin has increased the amount of PCSK9 in the subject.

[0284] In some embodiments, the ABP is a non-neutralizing ABP and is used to determine the amount of PCSK9 in a subject receiving an ABP and/or statin treatment.

### EXAMPLES

[0285] The following examples, including the experiments conducted and the results achieved, are provided for illustrative purposes only and are not to be construed as limiting.

### Example 1

### Generation of Anti-PCSK9 Antibodies and Hybridomas

[0286] Antibodies to the self-cleaved, mature, secreted PCSK9 comprising amino acids 31 to 692 of the amino acid sequence of SEQ ID NO: 2, were raised in XenoMouse® mice (Abgenix, Fremont, Calif.), which are mice containing human immunoglobulin genes. XenoMouse® strains including; XMG2KL, XMG4KL, XMG2/K and XMG4/K were used for immunization. PCSK9 was prepared using standard recombinant techniques using the GenBank sequence as reference (NM_{—}174936).

[0287] Each mouse was injected with a total of 10 μg of antigen delivered intraperitoneally into the abdomen. Subsequent boosts were 5 ug doses and injection method was staggered between intraperitoneal injections into the abdomen and sub-cutaneous injections at the base of the tail. For intraperitoneal injections, antigen was prepared as an emulsion with TiterMax® Gold (Sigma, Cat #T2684) and for subcutaneous injections antigen was mixed with Alum (aluminum phosphate) and CpG oligos. A final injection of 5 μg of antigen per mouse was delivered in Phospho buffered saline (“PBS”) and delivered into 2 sites, 50% IP into the abdomen and 50% SQ at the base of tail. The mice were injected with antigen eight to eleven times.

[0288] Mice were then monitored for an anti-PCSK-9 specific immune response using a titer protocol as follows: Costar 3368 medium binding plates were coated with neutravadin at 8 ug/ml (50 ul/well) and incubated at 4° C. in 1×PBS/0.05% azide overnight. They were washed using TiterTek 3-cycle wash with reverse osmosis purified (“RO”) water. Plates were blocked using 250 ul of 1×PBS/1% milk and incubated for at least 30 minutes at room temperature (“RT”). Block was washed off using TiterTek 3-cycle wash with RO water. Biotinylated (b)-human PCSK9 was captured at 2 ug/ml in 1×PBS/1% milk/10 mM Ca2+ (assay diluent) 50 ul/well and incubated for 1 hr at RT. Unbound b-PCSK9 was washed off using TiterTek 3-cycle wash with RO water. For the primary antibody, sera was titrated 1:3 in duplicate from 1:100. This was done in assay diluent 50 ul/well and incubated for hr at RT and then washed using TiterTek 3-cycle wash with RO water. The secondary antibody was goat anti Human IgG Fc HRP at 400 ng/ml in assay diluent at 50 ul/well. This was incubated for 1 hr at RT. This was then washed using TiterTek 3-cycle wash with RO water and patted dry on paper towels. For the substrate, one-step TMB solution (Neogen, Lexington, Ky.) was used (50 ul/well) and it was allowed to develop for 30 min at RT. Positive controls to detect plate bound PCSK9 were soluble LDL receptor (R&D Systems, Cat #2148LD/CF) and a polyclonal rabbit anti-PCSK9 antibody (Caymen Chemical #10007185) titrated 1:3 in duplicate from 3 μg/ml in assay diluent. LDLR was detected with goat anti LDLR (R&D Systems, Cat #AF2148) and rabbit anti goat IgGFc HRP at a concentration of 400 ng/ml; the rabbit polyclonal was detected with goat anti-rabbit IgG Fc at a concentration of 400 ng/ml in assay diluent. The negative control was naive XMG2-KL and XMG4-KL sera titrated 1:3 in duplicate from 1:100 in assay diluent.

[0289] Titers of the antibody against human PCSK9 were tested by ELISA assay for mice immunized with soluble antigen as described. Animals which were identified to have raised specific immune responses to PCSK9 were harvested and advanced to antibody generation. Multiple rounds of antibody generation were conducted to generate the panels used to select the antibodies described herein.

### Example 2

### Recovery of Lymphocytes, B-Cell Isolations, Fusions and Generation of Hybridomas

[0290] This example outlines how the immune cells were recovered and the hybridomas were generated. Selected immunized mice were sacrificed by cervical dislocation and the draining lymph nodes were harvested and pooled from each cohort. The B cells were dissociated from lymphoid tissue by grinding in DMEM to release the cells from the tissues, and the cells were suspended in DMEM. The cells were counted, and 0.9 ml DMEM per 100 million lymphocytes was added to the cell pellet to resuspend the cells gently but completely.

[0291] Lymphocytes were mixed with nonsecretory myeloma P3X63Ag8.653 cells purchased from ATCC, cat. #CRL 1580 (Kearney et al., (1979) J. Immunol. 123, 1548-1550) at a ratio of 1:4. The cell mixture was gently pelleted by centrifugation at 400×g 4 min. After decanting of the supernatant, the cells were gently mixed using a 1 ml pipette. Preheated PEG/DMSO solution from Sigma (cat #P7306) (1 ml per million of B-cells) was slowly added with gentle agitation over 1 min followed by 1 min of mixing. Preheated IDMEM (2 ml per million of B cells) (DMEM without glutamine, L-glutamine, pen/strep, MEM non-essential amino acids (all from Invitrogen), was then added over 2 minutes with gentle agitation. Finally preheated IDMEM (8 ml per 10⁶ B-cells) was added over 3 minutes.

[0292] The fused cells were spun down 400×g 6 min and resuspended in 20 ml selection media DMEM (Invitrogen), 15% FBS (Hyclone), supplemented with L-glutamine, pen/strep, MEM Non-essential amino acids, Sodium Pyruvate, 2-Mercaptoethanol (all from Invitrogen), HA-Azaserine Hypoxanthine and OPI (oxaloacetate, pyruvate, bovine insulin) (both from Sigma) and IL-6 (Boehringer Mannheim)) per million B-cells. Cells were incubated for 20-30 min at 37 C and then resuspended in 200 ml selection media and cultured for 3-4 days in T175 flask prior to 96 well plating. Accordingly, hybridomas that produced antigen binding proteins to PCSK9 were produced.

### Example 3

### Selection of PCSK9 Antibodies

[0293] The present example outlines how the various PCSK9 antigen binding proteins were characterized and selected. The binding of secreted antibodies (produced from the hybridomas produced in Examples 1 and 2) to PCSK9 was assessed. Selection of antibodies was based on one or more of the following characteristics; binding data, inhibition of PCSK9 binding to LDLR, pH sensitive binding, domain-specific binding and affinity.

### Primary Screen

[0294] A primary screen for antibodies which bind to wild-type PCSK9 was performed. The primary screen was performed on two harvests. The primary screen comprised an ELISA assay and was performed using the following protocol:

[0295] Costar 3702 medium binding 384 well plates (Corning Life Sciences) were employed. The plates were coated with neutravadin at a concentration of 4 μg/ml in 1×PBS/0.05% Azide, at a volume of 40 μl/well. The plates were incubated at 4° C. overnight. The plates were then washed using a Titertek plate washer (Titertek, Huntsville, Ala.). A 3-cycle wash was performed. The plates were blocked with 90 μl of 1×PBS/1% milk and incubated approximately 30 minutes at room temperature. The plates were then washed. Again, a 3-cycle wash was performed. The capture sample was biotinylated-PCSK9 and was added at 0.9 μg/ml in 1×PBS/1% milk/10 mM Ca²⁺ at a volume of 40 μl/well. The plates were then incubated for 1 hour at room temperature. Next, the plates were washed using the Titertek plate washer operated using a 3-cycle wash. 10 μl of supernatant was transferred into 40 μl of 1×PBS/1% milk/10 mM Ca² and incubated 1.5 hours at room temperature. Again the plates were washed using the Titertek plate washer operated using a 3-cycle wash. 40 μl/well of Goat anti-Human IgG Fc POD at a concentration of 100 ng/ml (1:4000) in 1×PBS/1% milk/10 mM Ca² was added to the plate and was incubated 1 hour at room temperature. The plates were washed once again, using a 3-cycle wash. Finally, 40 μl/well of One-step TMB (Neogen, Lexington, Ky.) was added to the plate and quenching with 40 l/well of IN hydrochloric acid was performed after 30 minutes at room temperature. OD's were read immediately at 450 nm using a Titertek plate reader. Positive binders are determined as those supernatants with a signal that is greater than three times the average signal of the negative control supernatants. The average signal of the negative control was 0.092. The results from this experiment for five selected antibodies is provided in Table 30A below.

TABLE 30A
Optical Density for mAbs in Early and Late Screens

| | Early | Late |
|---|---|---|
| mAb ID | Primary Screen | Primary Screen |
| 13G9 | 3.8 | 3.6 |
| 19A12 | 3.7 | 3.8 |
| 20D12 | 6.0 | 4.2 |
| 25B5 | 6.0 | 4.3 |
| 30G7 | 4.1 | 4.1 |

[0296] Multiple rounds of Immunization, hybridoma generation and primary screening resulted in the identification of 8306 antigen specific hybridomas being identified. The panels were then advanced to screening for the ability to block the LDLR binding interaction.

### Large Scale Receptor Ligand Blocking Screen

[0297] To screen for the antibodies that block PCSK9 binding to LDLR an assay was developed using the D374Y PCSK9 mutant. The mutant was used for this assay because it has a higher binding affinity to LDLR allowing a more sensitive receptor ligand blocking assay to be developed. The following protocol was employed in the receptor ligand blocking screen: Costar 3702 medium binding 384 well plates (Corning Life Sciences) were employed in the screen. The plates were coated with goat anti-LDLR (R&D Cat #AF2148) at 2 μg/ml in 1×PBS/0.05% Azide at a volume of 40 μl/well. The plates were incubated at 4° C. overnight. The plates were then washed using a Titertek plate washer (Titertek, Huntsville, Ala.). A 3-cycle wash was performed. The plates were blocked with 90 μl of 1×PBS/1% milk and incubated approximately 30 minutes at room temperature. The plates were then washed using the Titertek plate washer. A 3-cycle wash was performed. The capture sample was LDLR (R&D, Cat #2148LD/CF), and was added at 0.4 μg/ml in 1×PBS/1% milk/10 mM Ca²⁺ at a volume of 40 μL/well. The plates were then incubated for 1 hour and 10 minutes at room temperature. Contemporaneously, 20 ng/ml of biotinylated human D374Y PCSK9 was incubated with 15 microliters of hybridoma exhaust supernatant in Nunc polypropylene plates and the exhaust supernatant concentration was diluted 1:5. The plates were then pre-incubated for about 1 hour and 30 minutes at room temperature. Next, the plates were washed using the Titertek plate washer operated using a 3-cycle wash. 50 μl/well of the pre-incubated mixture was transferred onto the LDLR coated ELISA plates and incubated for 1 hour at room temperature. To detect LDLR-bound b-PCSK9, 40 μl/well streptavidin HRP at 500 ng/ml in assay diluent was added to the plates. The plates were incubated for 1 hour at room temperature. The plates were again washed using a Titertek plate washer. A 3-cycle wash was performed. Finally, 40 μl/well of One-step TMB (Neogen, Lexington, Ky.) was added to the plate and was quenched with 40 l/well of IN hydrochloric acid after 30 minutes at room temperature. OD's were read immediately at 450 nm using a Titertek plate reader. Maximum binding of b-PCSK9 is defined by the average signal of the negative control hybridoma supernatants. % Inhibition is calculated as; % Inhibition=1−(OD of Ab superanant+b-PCSK9/OD of Neg. control supernatant+b-PCSK9). The screen identified 384 antibodies that blocked the interaction between PCSK9 and the LDLR well, 100 antibodies blocked the interaction strongly (OD<0.3). These antibodies inhibited the binding interaction of PCSK9 and LDLR greater than 75% (greater than 75% inhibition).

[0298] The results for a selected group of antibodies is provided in Table 3B below.

TABLE 3B
% Inhibition of PCSK9 and LDLR

| | % Inhibition | % Inhibition |
|---|---|---|
| mAb ID | (expt. #1) | (expt. #2) |
| 13G9 | 62% | 77% |
| 19A12 | 89% | 91% |
| 20D12 | 91% | 92% |
| 25B5 | 94% | 93% |
| 30D12 | 93% | 94% |

### Example 4

### DH-Sensitive Binding

[0299] The panel of 8306 hybridomas was also screened for antibodies which have pH sensitive binding to PCSK9. To screen for pH sensitivity an ELISA binding assay was developed using the wild-type PCSK9 protein and was performed using the following protocol: Non-treated 384 well microtiter plates from Corning Costar Catalogue number 3702, were coated with neutravidin (Thermo 31000B) at 10 ug/ml 40 ul/well in 1×PBS with 0.01% sodium azide. Plates were wrapped in plastic stored at 4° C. overnight. Next day, all steps done at ambient room temperature, washed plate with reversed osmosis purified water for 3 cycles using Titertek Atlas microplate washer. The same wash protocol was used at all subsequent steps. Each well was blocked with 90 ul/well of 1×PBS/1% milk for at least 30 minutes. After wash, captured biotinylated human wild-type PCSK9 at 100 ng/ml 40 ul/well in 1×PBS/1% non fat skim milk with 10 mM calcium chloride (CaCl2). Incubated for 1 hour then wash. Binding of human anti human PCSK9 exhausted hybridoma culture spent media at 1:25, 1:125, and 1:625 final dilution was done at either pH7.4 or pH6.0 in 1×PBS/1% milk with 10 mM CaCl2. Incubated for 1 hour then wash. Detection of bound human antibodies was done with goat anti human IgG Fc HRP (Thermo P31413) at 100 ng/ml in 1×PBS/1% milk with 10 mM CaCl2. Incubated for 1 hour then added chromogenic substrate TMB, 3,3′,5,5′-tetramethylbenzidine, 40 ul/well and incubated for 30 minutes then stopped with one molar hydrochloric acid. Optical density at 450 nm read on Multiskan Ascent reader.

[0300] The results for selected antibodies is given in Table 40 below.

TABLE 40
Optical Density for Selected Antibodies Bound to PCSK9 at ph 7.4 or pH 6

| | Expt #1: | | | | | | Expt #2: | | | | | |
|---|---|---|---|---|---|---|---|---|---|---|---|---|
| | Hybridoma | | | Hybridoma | | | Hybridoma | | | Hybridoma Sup. @ | | |
| | Sup. @ 1:125 | | | Sup. @ 1:625 | | | Sup. @ 1:125 | | | 1:625 | | |
| | pH | | | pH | | | pH | | | pH | | |
| | 7.4 | pH 6 | OD | 7.4 | pH 6 | OD | 7.4 | pH 6 | OD | 7.4 | pH 6 | OD |
| mAb ID | OD | OD | diff | OD | OD | diff | OD | OD | diff | OD | OD | diff |
| 13G9 | 6.0 | 3.8 | 2.2 | 3.4 | 2.0 | 1.5 | 6.0 | 4.2 | 1.8 | 1.0 | 1.6 | −0.6 |
| 19A12 | 3.6 | 2.9 | 0.7 | 3.0 | 1.9 | 1.2 | 3.9 | 2.5 | 1.4 | 2.5 | 1.8 | 0.7 |
| 20D12 | 4.2 | 3.0 | 1.2 | 2.5 | 0.9 | 1.6 | 4.1 | 2.8 | 1.3 | 1.5 | 0.8 | 0.7 |
| 25B5 | 2.1 | 1.3 | 0.8 | 0.8 | 0.5 | 0.3 | 2.6 | 1.7 | 0.9 | 0.5 | 0.5 | 0.0 |
| 30D12 | 2.9 | 2.4 | 0.5 | 1.4 | 0.9 | 0.5 | 3.3 | 2.4 | 0.9 | 1.2 | 0.8 | 0.4 |

### Example 5

### Sequence Analysis of Antibody Heavy and Light Chains

[0301] The nucleic acid and amino acid sequences for the light and heavy chains of the above antibodies were then determined by Sanger (dideoxy) nucleotide sequencing. Amino acid sequences were then deduced for the nucleic acid sequences. Resulting amino and nucleic acid sequences for 13G9, 19A12, 20D12, 25B5 and 30D12 are presented in Tables 1-4 of the instant specification.

### Example 6

### Generation Anti-PCSK9 8A3 Antibody Variants

### Hotspot/Covariant Mutants

[0302] Utilizing the 8A3:PCSK9 co-crystal structure, the Interface Mutation client of the EGAD system (Pokala, N., and Handel, T. M. (2005) Energy functions for protein design: adjustment with protein-protein complex affinities, models for the unfolded state, and negative design of solubility and specificity, Journal of molecular biology 347, 203-27) was used to generate mutations in 8A3 and to calculate the resulting ΔΔG to indicate mutations that could potentially lower the bound energy state. As EGAD will not mutate glycine residues, a glycine in light chain CDR 1 was first mutated to alanine to prepare the structure complex for EGAD mutagenesis scanning. The 8A3 residues suitable for mutagenesis were indicated by selecting all 8A3 CDR residues that were within 6 Å of PCSK9. This resulted in 19 light chain and 15 heavy chain CDR residues selected for mutagenesis, totaling 34 residues. Each residue was allowed to mutate to all natural residues except cysteine, glycine, proline and tryptophan, in all single and double mutant combinations, resulting in 144,160 8A3 variants. During the EGAD calculations all residues within 4.5 Å of any mutation site were allowed to rotamer optimize. A panel of the lowest ΔΔG variants was selected to be cloned, expressed and screened. The binding kinetics of P2C6 (SS-12687), P2F5 (SS-12686) and P1B1 (SS-12685), are described in Example 11 below and in vivos data is given in Example 15 below.

[0303] Anti-PCSK9 antibody 8A3 (See SS-8086 in Table 60B) was subject to additional rounds of engineering to further improve its affinity and pH sensitivity. Specifically selected residues in the CDR region of 8A3 were systematically changed to other residues by standard mutagenesis method. Each variant was produced in HEK293 cells and analyzed for its ability to bind human PCSK9 at pH7.4 and pH5.5 respectively. Individual change in each CDR of 8A3 that leads to improved binding at pH7.4 or reduced binding at pH5.5 were combined in the next round of engineering.

### Further 8A3 Variants

[0304] The crystal structure of the PCSK9/8A3 complex was examined in order to gain insight into how the 8A3 variant, P2C6, has higher affinity binding to PCSK9. P2C6 differs at two CDR amino acids from the 8A3 parent molecule, LC Ser68(57)Leu and HC Ile129(107)Met. In the structure, position 68(57) is located in a region in close proximity to a frequently disordered loop in PCSK9, amino acids ˜212-222. The Ser68(57)Leu mutation may impart higher affinity to PCSK9 by allowing for specific interaction with this loop. In order to generate antibodies on a P2C6-like scaffold (8A3 variant LC Ser68(57)Leu only) with catabolic character, select amino acids in close proximity to amino acid 68(57) were mutated to histidine. Amino acids chosen for mutation were:

### LC Tyr38(35)

### LC Tyr57(54)

### LC Asn69(58)

### LC Ser72(61)

### LC Ser79(68)

### LC Ser83(72)

[0305] All single and double mutation combinations were made on the 8A3 LC Ser68(57)Leu parent molecule. 8A3 variants A01, A02 and C02 were found to maintain the desired binding kinetics of higher affinity at pH 7.4 and lower affinity at pH 5.5. Binding kinetics for A01, A02 and C02 are given in Table 60D.

TABLE 60A

| mAb ID | Mutations |
|---|---|
| SS-13983 | LC Tyr38(35)His, LC Ser68(57)Leu |
| A01 | |
| SS-13991 | LC Tyr38(35)His, LC Ser68(57)Leu, LC |
| A02 | Ser72(61)His |
| SS-13993 | LC Tyr38(35)His, LC Ser68(57)Leu, LC |
| C02 | Ser83(72)His |

TABLE 60B

| | | | |
|---|---|---|---|
| 31H4 | Heavy | SEQ ID | EVQLVESGGGLVKPGGSLRLSCAASGFTFSSYSMNW |
| SS 4201 | Chain | 1026 | VRQAPGKGLEWVSS |
| | | | ISSSSSYISYADSVKGRFTISRDNAKNSLYLQMNSLRA |
| | | | EDTAVYFCARDY |
| | | | DFWSAYYDAFDVWGQGTMVTVSSASTKGPSVFPLA |
| | | | PCSRSTSESTAALGC |
| | | | LVKDYFPEPVTVSWNSGALTSGVHTFPAVLQSSGLY |
| | | | SLSSVVTVPSSNFG |
| | | | TQTYTCNVDHKPSNTKVDKTVERKCCVECPPCPAPP |
| | | | VAGPSVFLFPPKPK |
| | | | DTLMISRTPEVTCVVVDVSHEDPEVQFNWYVDGVE |
| | | | VHNAKTKPREEQFNS |
| | | | TFRVVSVLTVVHQDWLNGKEYKCKVSNKGLPAPIEK |
| | | | TISKTKGQPREPQV |
| | | | YTLPPSREEMTKNQVSLTCLVKGFYPSDIAVEWESN |
| | | | GQPENNYKTTPPML |
| | | | DSDGSFFLYSKLTVDKSRWQQGNVFSCSVMHEALH |
| | | | NHYTQKSLSLSPGK |
| 31H4 | Light Chain | SEQ ID | ESVLTQPPSVSGAPGQRVTISCTGSSSNIGAGYDVHW |
| SS-4201 | | 1027 | YQQLPGTAPKLLI |
| | | | SGNSNRPSGVPDRFSGSKSGTSASLAITGLQAEDEAD |
| | | | YYCQSYDSSLSGS |
| | | | VFGGGTKLTVLGQPKAAPSVTLFPPSSEELQANKATL |
| | | | VCLISDFYPGAVT |
| | | | VAWKADSSPVKAGVETTTPSKQSNNKYAASSYLSLT |
| | | | PEQWKSHRSYSCQV |
| | | | THEGSTVEKTVAPTECS |
| SS 14573 | Heavy | SEQ ID | EVQLVESGGGLVKPGGSLRLSCAASGFTFSSYSMNW |
| | Chain | 1028 | VRQAPGKGLEWVSSISSSSSYISYADSVKGRFTISRDN |
| | | | AKNSLY |
| | | | LQMNSLRAEDTAVYFCARDYDFHSAYYDAFDVWG |
| | | | QGTMVTVSSASTKGPSVFPLAPCSRSTSESTAALGCL |
| | | | VKDYFPEPV |
| | | | TVSWNSGALTSGVHTFPAVLQSSGLYSLSSVVTVPSS |
| | | | NFGTQTYTCNVDHKPSNTKVDKTVERKCCVECPPCP |
| | | | APPVAGP |
| | | | SVFLFPPKPKDTLMISRTPEVTCVVVDVSHEDPEVQF |
| | | | NWYVDGVEVHNAKTKPREEQFNSTFRVVSVLTVVH |
| | | | QDWLNGKE |
| | | | YKCKVSNKGLPAPIEKTISKTKGQPREPQVYTLPPSRE |
| | | | EMTKNQVSLTCLVKGFYPSDIAVEWESNGQPENNYK |
| | | | TTPPML |
| | | | DSDGSFFLYSKLTVDKSRWQQGNVFSCSVMHEALH |
| | | | NHYTQKSLSLSPGK |
| SS-14573 | Light Chain | SEQ ID | ESVLTQPPSVSGAPGQRVTISCTGSSSNIGAGYDVHW |
| | | 1029 | YQQLPGTAPKLLISGNSNRPSGVPDRFSGSKSGTSASL |
| | | | AITGL |
| | | | QAEDEADYYCQSYDSSLSGSVFGGGTKLTVLGQPKA |
| | | | APSVTLFPPSSEELQANKATLVCLISDFYPGAVTVAW |
| | | | KADSSPV |
| | | | KAGVETTTPSKQSNNKYAASSYLSLTPEQWKSHRSY |
| | | | SCQVTHEGSTVEKTVAPTECS |

### Example 7

[0306] For example, as shown in Table 70A, when Serine 57 position in LC CDR2 of 8A3 (SS-8086) was changed to all other resides, and paired with HC 1107M, several variants demonstrated improved binding at pH7.4. However, all the variants still bind tightly at pH5.5 some with an estimated half life of dissociation longer than 800 seconds and some with an estimated half life of dissociation around 450 seconds which is faster than the parental P2C6 (SS-12687).

TABLE 70A
Analysis of the binding to huPCSK9 for 8A3 variants at pH 7.4 and pH 5.5 by
surface plasmon resonance (SPR)

| | | | ka | | | pH 5.5 |
|---|---|---|---|---|---|---|
| | | AA | (1/Ms) | kd (1/s) | Kd (M) | estimated |
| well | LC | mutation | pH 7.4 | pH 7.4 | pH 7.4 | half life (s) |
| P2C6, SS- | LC1(S57*) | L | 4.62E+05 | 6.71E−05 | 1.45E−10 | 800 |
| 12687 | | | | | | |
| A01 | LC1(S57*) | W | 4.72E+05 | 3.83E−05 | 8.11E−11 | 800 |
| A02 | LC1(S57*) | I | 4.70E+05 | 3.88E−05 | 8.26E−11 | 800 |
| A03 | LC1(S57*) | A | 4.58E+05 | 4.74E−05 | 1.04E−10 | 800 |
| B01 | LC1(S57*) | H | 4.54E+05 | 2.99E−05 | 6.57E−11 | 800 |
| B02 | LC1(S57*) | C | 4.34E+05 | 5.99E−05 | 1.38E−10 | 800 |
| B03 | LC1(S57*) | Q | 4.52E+05 | 3.19E−05 | 7.06E−11 | 800 |
| C01 | LC1(S57*) | M | 4.79E+05 | 4.12E−06 | 8.61E−12 | 800 |
| D01 | LC1(S57*) | R | 3.99E+05 | 3.72E−05 | 9.33E−11 | 450 |
| D02 | LC1(S57*) | Y | 4.61E+05 | 8.34E−05 | 1.81E−10 | 800 |
| E01 | LC1(S57*) | G | 4.59E+05 | 5.64E−05 | 1.23E−10 | 800 |
| E02 | LC1(S57*) | E | 5.64E+05 | 5.00E−05 | 8.87E−11 | 800 |
| E03 | LC1(S57*) | H | 4.60E+05 | 3.41E−05 | 7.40E−11 | 450 |
| F01 | LC1(S57*) | F | 4.36E+05 | 2.00E−05 | 4.60E−11 | 800 |
| F03 | LC1(S57*) | H | 4.64E+05 | 4.49E−05 | 9.66E−11 | 800 |
| G01 | LC1(S57*) | D | 5.37E+05 | 6.60E−05 | 1.23E−10 | 800 |
| G02 | LC1(S57*) | K | 3.71E+05 | 7.93E−05 | 2.14E−10 | 450 |
| G03 | LC1(S57*) | S | 4.08E+05 | 5.27E−05 | 1.29E−10 | 450 |
| H01 | LC1(S57*) | V | 4.10E+05 | 5.52E−05 | 1.34E−10 | 450 |
| H02 | LC1(S57*) | S | 4.25E+05 | 8.10E−05 | 1.91E−10 | 450 |
| H03 | LC1(S57*) | S | 4.26E+05 | 6.47E−05 | 1.52E−10 | 450 |

[0307] Surprisingly, when some of changes at S57 position are combined with N33F at LC CDR1, almost all the variants demonstrated fast off rate at pH5.5 while still maintaining high affinity at pH7.4 as shown in Table 70B.

TABLE 70B
Analysis of the binding to huPCSK9 for 8A3 variants at pH 7.4 and pH 5.5

| | | | | | | pH 5.5 |
|---|---|---|---|---|---|---|
| | | | | | | estimated |
| | | AA | ka (1/Ms) | kd (1/s) | Kd (M) | half life |
| well | LC | mutation | pH 7.4 | pH 7.4 | pH 7.4 | (s) |
| A04 | LC2(N33F, S57*) | A | 8.55E+05 | 4.93E−04 | 5.76E−10 | NB |
| A05 | LC2(N33F, S57*) | S | 9.51E+05 | 5.97E−04 | 6.28E−10 | 20 |
| B04 | LC2(N33F, S57*) | N | 8.69E+05 | 3.25E−04 | 3.75E−10 | NB |
| B05 | LC2(N33F, S57*) | E | 1.05E+06 | 4.69E−04 | 4.45E−10 | 20 |
| C04 | LC2(N33F, S57*) | T | 8.46E+05 | 4.38E−04 | 5.18E−10 | 20 |
| C05 | LC2(N33F, S57*) | C | 8.11E+05 | 5.56E−04 | 6.86E−10 | 20 |
| D05 | LC2(N33F, S57*) | K | 8.16E+05 | 8.87E−04 | 1.09E−09 | 20 |
| E04 | LC2(N33F, S57*) | D | 9.43E+05 | 5.29E−04 | 5.61E−10 | 20 |
| E05 | LC2(N33F, S57*) | L | 9.31E+05 | 6.17E−04 | 6.63E−10 | 20 |
| F04 | LC2(N33F, S57*) | M | 8.51E+05 | 2.13E−04 | 2.50E−10 | 20 |
| F05 | LC2(N33F, S57*) | V | 7.89E+05 | 5.48E−04 | 6.95E−10 | 20 |
| G04 | LC2(N33F, S57*) | Y | 1.01E+06 | 4.33E−04 | 4.30E−10 | 20 |
| G05 | LC2(N33F, S57*) | R | 9.08E+05 | 7.51E−04 | 8.27E−10 | 20 |
| H04 | LC2(N33F, S57*) | G | 8.10E+05 | 3.50E−04 | 4.32E−10 | 20 |

[0308] In addition, other combination mutants of 8A3 variants were produced and analyzed by SPR. As shown in Table 70C four different heavy chain variants were combined with 11 different light chain variants to generate a large panel of new binders. All these clones were analyzed by SPR for their binding affinity to huPCSK9 at pH 7.4 and pH 5.5. A small panel of 8A3 variants were selected for large scale production and additional characterization.

TABLE 70C
8A3 variants generated by combination of different HC and LC variants

| | | | ka | kd | Kd |
|---|---|---|---|---|---|
| | | | (1/Ms) | (1/s) | (M) |
| SS# | HC | LC | pH 7.4 | pH 7.4 | pH 7.4 |
| SS-8086 | Parental | Parental | 2.55E+05 | 2.18E−04 | 8.54E−10 |
| (8A3) | | | | | |
| | M103S/I107M | N33Y | 6.25E+05 | 1.28E−03 | 2.05E−09 |
| | M103F/I107M | N33Y | 5.20E+05 | 4.12E−04 | 7.93E−10 |
| | M103N/I107M | N33Y | 5.50E+05 | 7.55E−04 | 1.37E−09 |
| | I107M | N33Y | 6.05E+05 | 5.45E−04 | 9.01E−10 |
| | M103S/I107M | N33F | 7.22E+05 | 1.12E−03 | 1.55E−09 |
| | M103F/I107M | N33F | 6.51E+05 | 2.75E−04 | 4.23E−10 |
| | M103N/I107M | N33F | 7.38E+05 | 5.86E−04 | 7.94E−10 |
| | I107M | N33F | 7.50E+05 | 4.00E−04 | 5.33E−10 |
| | M103S/I107M | S57L | 3.72E+05 | 7.42E−05 | 1.99E−10 |
| | M103F/I107M | S57L | 3.20E+05 | 3.79E−05 | 1.18E−10 |
| | M103N/I107M | S57L | 3.11E+05 | 4.20E−05 | 1.35E−10 |
| SS-12687 | I107M | S57L | 4.08E+05 | 4.08E−05 | 1.00E−10 |
| SS-15504 | M103S/I107M | Y35H, S57L, S61H | 3.56E+05 | 8.26E−05 | 2.32E−10 |
| SS-15505 | M103F/I107M | Y35H, S57L, S61H | 2.60E+05 | 1.98E−05 | 7.63E−11 |
| SS-15506 | M103N/I107M | Y35H, S57L, S61H | 2.40E+05 | 5.89E−05 | 2.45E−10 |
| SS-15195 | I107M | Y35H, S57L, S61H | 3.25E+05 | 1.98E−05 | 6.11E−11 |
| | WT | N33Y, S57L | 4.62E+05 | 1.10E−03 | 2.37E−09 |
| | M103S/I107M | N33Y, S57L | 6.11E+05 | 7.59E−04 | 1.24E−09 |
| | M103F/I107M | N33Y, S57L | 4.83E+05 | 2.06E−04 | 4.25E−10 |
| | M103N/I107M | N33Y, S57L | 4.96E+05 | 4.39E−04 | 8.84E−10 |
| | I107M | N33Y, S57L | 5.76E+05 | 2.90E−04 | 5.04E−10 |
| SS-15507 | WT | N33F, S57L | 5.87E+05 | 9.86E−04 | 1.68E−09 |
| SS-15503 | M103S/I107M | N33F, S57L | 6.74E+05 | 6.73E−04 | 9.98E−10 |
| SS-15494 | M103F/I107M | N33F, S57L | 6.08E+05 | 1.49E−04 | 2.46E−10 |
| SS-15502 | M103N/I107M | N33F, S57L | 6.81E+05 | 3.38E−04 | 4.96E−10 |
| SS-14892 | I107M | N33F, S57L | 6.31E+05 | 2.23E−04 | 3.53E−10 |
| | M103S/I107M | Y35H, S57L | 3.47E+05 | 7.89E−05 | 2.28E−10 |
| | M103F/I107M | Y35H, S57L | 2.64E+05 | 2.46E−05 | 9.32E−11 |
| | M103N/I107M | Y35H, S57L | 2.52E+05 | 3.42E−05 | 1.35E−10 |
| | I107M | Y35H, S57L | 3.27E+05 | 5.03E−05 | 1.54E−10 |
| | M103S/I107M | S57L, S61H | 3.43E+05 | 6.43E−05 | 1.87E−10 |
| | M103F/I107M | S57L, S61H | 2.64E+05 | 2.60E−05 | 9.85E−11 |
| | M103N/I107M | S57L, S61H | 2.65E+05 | 3.54E−05 | 1.33E−10 |
| | I107M | S57L, S61H | 3.24E+05 | 2.62E−05 | 8.07E−11 |
| | WT | N33Y, Y35H, S57L, S61H | 4.10E+05 | 1.15E−03 | 2.81E−09 |
| | M103S/I107M | N33Y, Y35H, S57L, S61H | 5.94E+05 | 7.58E−04 | 1.28E−09 |
| | M103F/I107M | N33Y, Y35H, S57L, S61H | 4.80E+05 | 2.53E−04 | 5.28E−10 |
| | M103N/I107M | N33Y, Y35H, S57L, S61H | 5.19E+05 | 4.25E−04 | 8.19E−10 |
| | I107M | N33Y, Y35H, S57L, S61H | 5.70E+05 | 3.26E−04 | 5.72E−10 |
| SS-15508 | WT | N33F, Y35H, S57L, S61H | 5.85E+05 | 9.20E−04 | 1.57E−09 |
| SS-15501 | M103S/I107M | N33F, Y35H, S57L, S61H | 7.19E+05 | 5.78E−04 | 8.04E−10 |
| SS-15495 | M103F/I107M | N33F, Y35H, S57L, S61H | 5.34E+05 | 1.52E−04 | 2.85E−10 |
| SS-15500 | M103N/I107M | N33F, Y35H, S57L, S61H | 6.63E+05 | 3.04E−04 | 4.59E−10 |
| SS-15496 | I107M | N33F, Y35H, S57L, S61H | 6.65E+05 | 1.94E−04 | 2.92E−10 |
| SS-14835 | WT | G33 insertion, S57L/L97I, Q98H | 3.06E+05 | 1.63E−04 | 5.34E−10 |
| SS-15497 | M103S/I107M | G33 insertion, S57L/L97I, Q98H | 3.81E+05 | 9.47E−05 | 2.49E−10 |
| SS-15498 | M103F/I107M | G33 insertion, S57L/L97I, Q98H | 3.35E+05 | 4.14E−05 | 1.23E−10 |
| SS-15499 | M103N/I107M | G33 insertion, S57L/L97I, Q98H | 3.01E+05 | 5.98E−05 | 1.99E−10 |
| SS-15196 | I107M | G33 insertion, S57L/L97I, Q98H | 3.77E+05 | 5.06E−05 | 1.34E−10 |

### Production and Characterization of Selected 8A3 Variants.

[0309] DNA vectors (pTT5) that encode the heavy chain and light chain of anti-PCSK9 8A3 (SS-8086) variants were cotransfected into HEK293-6E cells, and the culture media was harvested after 6 days, concentrated and purified by Mabselect Sure column in TBS binding buffer and elute with 100 mM Sodium acetate, PH=3.5. Adjusting pH to 5.5 with 1M Tris.pH8.0, Eluted samples were concentrated and buffer exchanged to A52Su (Glacial acetic acid 10 mM/sucrose 9%, pH 5.2).

[0310] A panel of selected 8A3 variants were produced and purified and their binding affinity to human PCSK9 was measured by solution based equilibrium assay as follows: Binding of anti-PCSK9 antibodies to human and cynomolgus monkey PCSK9 was measured by solution equilibrium binding assay on BIAcore. Antibody was immobilized on the second flow cell of a CM5 chip using amine coupling (reagents provided by GE Healthcare, Piscataway, N.J.) with an approximate density of 7000 RU. The first flow cell was used as a background control. For assay at pH 7.4, 1.0 nM of PCSK9 were mixed with serial dilutions of antibody (ranging from 0.02 nM to 150 nM) in PBS plus 0.1 mg/mL BSA, 0.005% P20 and incubated at room temperature for 4 hours. For assay at pH 5.5, 1.0 nM of PCSK9 were mixed with serial dilutions of antibody (ranging from 0.07 nM to 450 nM) in 10 mM Sodium Citrate, pH 5.5, plus 150 mM NaCl, 0.1 mg/mL BSA, 0.005% P20 and incubated at room temperature for 4 hours. Binding of free PCSK9 in the mixed solutions was measured by injecting over the antibody coated chip surface. One hundred percent PCSK9 binding signal on the antibody surface was determined in the absence of antibody in the solution. A decreased PCSK9 binding response with increasing concentrations of antibody in solution indicated PCSK9 was binding to the antibody, preventing PCSK9 from binding to the immobilized antibody surface. Plotting the PCSK9 binding signal versus antibody concentration, the KD was obtained from nonlinear regression of the competition curves using an n-curve one-site homogeneous binding model provided in the KinExA Pro software. The results are presented in Table 70D) below.

TABLE 70D
Analysis of the binding of 8A3 variants to human PCSK9 by solution based
equilibrium assay

| 8A3 variants | | | To huPCSK9- | | To | | |
|---|---|---|---|---|---|---|---|
| | Light | | pH 7.4 | | huPCSK9-pH 5.5 | | pH 5.5 |
| | Chains | Heavy Chain | KD | 95% CI | KD | | KD |
| mAb ID | (mutation) | (mutation) | (pM) | (pM) | (pM) | 95% CI (pM) | ratio |
| SS-8086 | WT | WT | 500 | 300~600 | 5000 | 4000~6000 | 10 |
| (8A3) | | | | | | | |
| SS-12686 | N33F | I107M | 410 | 340~510 | 3900 | 3300~4500 | 9.5 |
| (P2F5) | | | | | | | |
| SS-12687 | S57L | | 39 | 25~56 | 150 | 120~190 | 3.8 |
| (P2C6) | | | | | | | |
| SS-12526 | N33F + S57L | | 280 | 250~300 | 3900 | 3400~4200 | 13.9 |
| (P2F5/P2C6) | | | | | | | |
| SS-15509 | N33F + S57M | “VH13” (M103F, | 250 | 210~290 | 3000 | 2400~3600 | 12 |
| SS-15510 | N33F + S57F | I107M) | 430 | 320~490 | 4100 | 3300~5100 | 9.5 |
| SS-15511 | N33F + | | 570 | 450~660 | 9600 | 8300~11000 | 16.8 |
| | S57H | | | | | | |
| SS-15512 | N33F + S57N | | 230 | 140~350 | 3900 | 2800~5200 | 17 |
| SS-15513 | N33F + | | 480 | 450~520 | 3500 | 2900~4300 | 7.3 |
| | S57W | | | | | | |
| SS-15514 | N33F + | | 350 | 300~410 | 3900 | 3100~4800 | 11.1 |
| | S57Q | | | | | | |
| SS-15497 | G33, S57L, | “VH6”(M103S, | 84 | 70~100 | 680 | 570~820 | 8.1 |
| | L97I, Q98H | I107M) | | | | | |
| SS-15515 | G33, | | 120 | 100~150 | 1500 | 1400~1700 | 12.5 |
| | S57M, | | | | | | |
| | L97I, Q98H | | | | | | |
| SS-15516 | G33, S57F, | | 120 | 98~150 | 1000 | 880~1200 | 8.3 |
| | L97I, Q98H | | | | | | |
| SS-15517 | G33, | | 240 | 210~270 | 3300 | 3000~3500 | 138 |
| | S57H, | | | | | | |
| | L97I, Q98H | | | | | | |
| SS-15518 | G33, | | 140 | 110~180 | 1200 | 1000~1500 | 8.6 |
| | S57N, | | | | | | |
| | L97I, Q98H | | | | | | |
| SS-15519 | G33, | | 83 | 72~96 | 860 | 820~900 | 10.4 |
| | S57W, | | | | | | |
| | L97I, Q98H | | | | | | |
| SS-15520 | G33, | | 170 | 150~190 | 1200 | 1000~1500 | 7.1 |
| | S57Q, | | | | | | |
| | L97I, Q98H | | | | | | |
| SS-15522 | S57L, | “VH6”(M103S, | 460 | 360~590 | 1400 | 970~1900 | 3 |
| | N58A | I107M) | | | | | |
| SS-15524 | S57L, | “VH13” (M103F, | 99 | 80~120 | 290 | 260~320 | 2.9 |
| | N58A | I107M) | | | | | |
| SS-13983 | Y35H, | WT | 280 | 250~310 | 2900 | 2700~3200 | 10.4 |
| (A01) | S37L | | | | | | |
| SS-13991 | Y35H, | | 290 | 240~360 | 2800 | 2400~3200 | 9.7 |
| (A02) | S57L, | | | | | | |
| | S61H | | | | | | |
| SS-13993 | Y35H, | | 230 | 180~290 | 2800 | 2400~3200 | 12.2 |
| (C02) | S57L, | | | | | | |
| | S72H | | | | | | |
| SS-14835 | G33, S57L, | | 350 | 320~380 | 3100 | 2700~3300 | 8.9 |
| | L97I, Q98H | | | | | | |
| SS-15194 | Y35H, | I107M | 26 | 19~34 | 350 | 270~450 | 13.5 |
| | S57L | | | | | | |
| SS-15195 | Y35H, | | 35 | 27~45 | 450 | 420~480 | 12.9 |
| | S57L, | | | | | | |
| | S61H | | | | | | |
| SS-15196 | G33, S57L, | | 56 | 50~63 | 570 | 520~600 | 10.2 |
| | L97I, Q98H | | | | | | |
| SS-14894 | G33, S57L | | 170 | 130~200 | 1500 | 1300~1700 | 8.8 |

### Example 8

### Production of 31H4 Variants

[0311] In order to generate antibodies on the 31H4 (SS-4201) scaffold with catabolic character, select CDR amino acids were mutated to histidine. Amino acids were chosen based on their proximity to PCSK9, after analysis of the PCSK9/31 H4 complex structure. The first round of variants were made as single mutations on the 31H4 W113(103)H scaffold. (SS-14573) Amino acids chosen for mutation were:

### LC Tyr39(33)

### LC Tyr109(93)

### LC Ser135(98)

### HC Phe29(27)

### HC Phe31(29)

### HC Tyr39(32)

### HC Ser61(54)

### HC Ser66(56)

### HC Tyr67(57)

### HC Ile68(58)

### HC Tyr70(60)

### HC Asp72(62)

### HC Ser73(63)

### HC Asp109(99)

### HC Tyr110(100)

### HC Asp111(101)

### HC Phe112(102)

### HC Tyr132(106)

### HC Tyr133(107)

[0312] The scaffold numbering is arrived at using a structure based numbering system (ResidueAHo (Linear). Honegger, a, and a Plückthun. “Yet Another Numbering Scheme for Immunoglobulin Variable Domains: An Automatic Modeling and Analysis Tool.” Journal of Molecular Biology 309, no. 3 (2001): 657-70) along with linear numbering. Linear numbering starts with the mature sequence as the first residue, so that a residue is depicted as a ResidueAHo (Linear). Binding data from the first round of variants was used to guide selection of mutations to keep for the second round. Mutations were kept if they maintained high affinity binding at pH 7.4, or showed signs of weaker binding at pH 5.5 while maintaining pH 7.4 affinity. In the second round, all possible double combinations were made on the 31H4 W113(103)H (SS-14573) scaffold. Amino acids kept for the second round were as listed in Table 80A below:

TABLE 80A

| Mutation | mAb ID |
|---|---|
| LC Tyr39(33) | SS-14570 |
| LC Tyr109(93) | SS-14571 |
| LC Ser135(98) | SS-14572 |
| HC Phe29(27) | SS-14544 |
| HC Phe31(29) | SS-14545 |
| HC Tyr39(32) | SS-14555 |
| HC Ser61(54) | SS-14556 |
| HC Ser66(56) | SS-14557 |
| HC Ile68(58) | SS-14558 |
| HC Tyr70(60) | SS-14560 |
| HC Asp72(62) | SS-14561 |
| HC Ser73(63) | SS-14562 |
| HC Tyr132(106) | SS-14568 |
| HC Tyr133(107) | SS-14569 |

### Example 9

### Anti-PCSK9 Constant Region Antibody Variants

[0313] Two 8A3 variants, 8A3HLE51 (mAb ID SS-13406), P2C6-HLE51 (mAb ID SS-14888) and 8A3HLE112 (mAb ID SS-13407), were constructed by fusing the heavy chain variable domain of 8A3 into human IgG2 constant domains that has been engineered to extend serum half life, IgG2HLE-51 and IgG2HLE112 respectively as described in PCT/US2012/070146 herein incorporated by reference in its entirety. DNA vectors encode the heavy chain and light chain of each 8A3 variant were co-transfected into human HEK293-6E cells. The condition media were harvested after 6 days of culture and concentrated by diafiltration and captured by MabSelect SuRe (GE Healthcare Bio-Sciences, L.L.C., Uppsala, Sweden) column and eluted with 0.5% acetate pH 3.5. Pooled fractions were neutralized with addition of 1M HEPES pH 7.9 and diluted with 25 mM sodium acetate pH 5.2. The neutralized pool was purified by SP Sepharose HP (75 ml), eluted with a linear gradient of 0%-40% B in 20CV (B=25 mM acetate pH 5.2, 1M NaCl). Pooled fractions were dialyzed into A5Su formulation buffer (Glacial acetic acid 10 mM/sucrose 9%, pH 5.2). Two variants, 8A3HLE51 (mAb ID SS-13406) and 8A3HLE112 (mAb ID SS-13407) were tested in vivos as described in Example 16 below.

### Example 10

### Binding Kinetics of Anti-PCSK9 8A3 Variants

[0314] The anti-PCSK9 8A3 variants described in Example 6 herein were analyzed as follows for binding kinetics. In order to determine the binding kinetics at the neutral pH, the biosensor analysis was conducted at 25° C. in a HBS-P buffer system (10 mM HEPES pH 7.4, 150 mM NaCl, and 0.05% Surfactant P20) using a ProteOn XPR36 optical biosensor (Bio-Rad, Hercules, Calif.) equipped with a GLC sensor chip (Bio-Rad, Hercules, Calif.). The chip surface was prepared using a goat anti-human IgG capture antibody (Jackson Laboratories; 109-005-098) that was immobilized to all channels in the horizontal direction of the sensor chip using standard amine coupling chemistry to a level of 5,000-6,000 RU. This surface type provided a format for reproducibly capturing fresh analysis antibodies (ligand) after each regeneration step. The anti-PCSK9 8A3 variants and the control anti-PCSK9 8A3 were captured to channels 1-6 in the vertical direction (˜100-150 RU). Five rhu PCSK9 concentrations ranging from 100 to 1.23 nM (3-fold dilutions) in running buffer were injected simultaneously over the chip surface in the horizontal direction. Blank (buffer) injections were run simultaneously with the five analyte concentrations and used to assess and subtract system artifacts. The association phase were monitored for 300 s, at a flow rate of 50 uL/min, while the dissociation phase were monitored for 1800 s, at a flow rate of 50 uL/min. The surface was regenerated with 10 mM glycine, pH 1.5 for 30 s, at a flow rate of 50 uL/min. The data was aligned, double referenced, and fit to a simple 1:1 binding model using the ProteOn Manager 3.1.0 version 3.1.06 © software (Bio-Rad, Hercules, Calif.).

[0315] In order to determine an estimated complex half-life at the acidic pH, a similar method was used using a HBS-P buffer system (10 mM HEPES pH 5.5, 150 mM NaCl, 0.05% Surfactant P20, and 1 mg/ml BSA). The data was aligned and double referenced using the ProteOn Manager 3.1.0 version 3.1.06 © software (Bio-Rad, Hercules, Calif.), and the variants were quantitatively binned using control antibodies of know complex half life, 8A3 parental (SS-8086), P1B1 (SS-12685), P2F5 (SS-12686) and P2C6 (SS-12687).

[0316] The association and dissociation kinetic binding constants (ka, kd), and the dissociation equilibrium binding constant (Kd) for huPCSK9 binding to anti-PCSK9 8A3 variants at pH 7.4, 25° C. were determined in addition to an estimated complex half-life at pH 5.5, 25° C. The affinity (Kd) at pH 7.4 and the estimated complex half-life for the anti-PCSK9 8A3 variants are shown in FIGS. 1 and 2. The full kinetic data is shown in Table 10A and 10B.

TABLE 10A
anti-PCSK9 8A3 engineered variants kinetic rate constants, pH 7.4 and
estimate complex half life, pH 5.5.

| | | | | | | pH 5.5 |
|---|---|---|---|---|---|---|
| | | | | | | estimated |
| | | AA | ka (1/Ms) | kd (1/s) | Kd (M) | complex |
| HC | LC | mutation | pH 7.4 | pH 7.4 | pH 7.4 | half life (s) |
| I107M | LC1(S57*) | W | 4.72E+05 | 3.83E−05 | 8.11E−11 | 800 |
| I107M | LC1(S57*) | I | 4.70E+05 | 3.88E−05 | 8.26E−11 | 800 |
| I107M | LC1(S57*) | A | 4.58E+05 | 4.74E−05 | 1.04E−10 | 800 |
| I107M | LC1(S57*) | H | 4.54E+05 | 2.99E−05 | 6.57E−11 | 800 |
| I107M | LC1(S57*) | C | 4.34E+05 | 5.99E−05 | 1.38E−10 | 800 |
| I107M | LC1(S57*) | Q | 4.52E+05 | 3.19E−05 | 7.06E−11 | 800 |
| I107M | LC1(S57*) | M | 4.79E+05 | 4.12E−06 | 8.61E−12 | 800 |
| I107M | LC1(S57*) | L | 4.62E+05 | 6.71E−05 | 1.45E−10 | 800 |
| I107M | LC1(S57*) | R | 3.99E+05 | 3.72E−05 | 9.33E−11 | 450 |
| I107M | LC1(S57*) | Y | 4.61E+05 | 8.34E−05 | 1.81E−10 | 800 |
| I107M | LC1(S57*) | G | 4.59E+05 | 5.64E−05 | 1.23E−10 | 800 |
| I107M | LC1(S57*) | E | 5.64E+05 | 5.00E−05 | 8.87E−11 | 800 |
| I107M | LC1(S57*) | H | 4.60E+05 | 3.41E−05 | 7.40E−11 | 450 |
| I107M | LC1(S57*) | F | 4.36E+05 | 2.00E−05 | 4.60E−11 | 800 |
| I107M | LC1(S57*) | H | 4.64E+05 | 4.49E−05 | 9.66E−11 | 800 |
| I107M | LC1(S57*) | D | 5.37E+05 | 6.60E−05 | 1.23E−10 | 800 |
| I107M | LC1(S57*) | K | 3.71E+05 | 7.93E−05 | 2.14E−10 | 450 |
| I107M | LC1(S57*) | S | 4.08E+05 | 5.27E−05 | 1.29E−10 | 450 |
| I107M | LC1(S57*) | V | 4.10E+05 | 5.52E−05 | 1.34E−10 | 450 |
| I107M | LC1(S57*) | S | 4.25E+05 | 8.10E−05 | 1.91E−10 | 450 |
| I107M | LC1(S57*) | S | 4.26E+05 | 6.47E−05 | 1.52E−10 | 450 |
| I107M | LC2(N33F, S57*) | A | 8.55E+05 | 4.93E−04 | 5.76E−10 | NB |
| I107M | LC2(N33F, S57*) | S | 9.51E+05 | 5.97E−04 | 6.28E−10 | 20 |
| I107M | LC2(N33F, S57*) | N | 8.69E+05 | 3.25E−04 | 3.75E−10 | NB |
| I107M | LC2(N33F, S57*) | E | 1.05E+06 | 4.69E−04 | 4.45E−10 | 20 |
| I107M | LC2(N33F, S57*) | T | 8.46E+05 | 4.38E−04 | 5.18E−10 | 20 |
| I107M | LC2(N33F, S57*) | C | 8.11E+05 | 5.56E−04 | 6.86E−10 | 20 |
| I107M | LC2(N33F, S57*) | W | 8.55E+05 | 3.66E−04 | 4.27E−10 | NB |
| I107M | LC2(N33F, S57*) | K | 8.16E+05 | 8.87E−04 | 1.09E−09 | 20 |
| I107M | LC2(N33F, S57*) | D | 9.43E+05 | 5.29E−04 | 5.61E−10 | 20 |
| I107M | LC2(N33F, S57*) | L | 9.31E+05 | 6.17E−04 | 6.63E−10 | 20 |
| I107M | LC2(N33F, S57*) | M | 8.51E+05 | 2.13E−04 | 2.50E−10 | 20 |
| I107M | LC2(N33F, S57*) | V | 7.89E+05 | 5.48E−04 | 6.95E−10 | 20 |
| I107M | LC2(N33F, S57*) | Y | 1.01E+06 | 4.33E−04 | 4.30E−10 | 20 |
| I107M | LC2(N33F, S57*) | R | 9.08E+05 | 7.51E−04 | 8.27E−10 | 20 |
| I107M | LC2(N33F, S57*) | G | 8.10E+05 | 3.50E−04 | 4.32E−10 | 20 |

TABLE 10B
anti-PCSK9 8A3 engineered variants kinetic rate constants,
pH 7.4 and estimate complex half life, pH 5.5.

| | | | ka | kd | Kd |
|---|---|---|---|---|---|
| | | | (1/Ms) | (1/s) | (M) |
| SS# | HC | LC | pH 7.4 | pH 7.4 | pH 7.4 |
| SS-8086 | WT | WT | 2.55E+05 | 2.18E−04 | 8.54E−10 |
| | M103S/I107M | N33Y | 6.25E+05 | 1.28E−03 | 2.05E−09 |
| | M103F/I107M | N33Y | 5.20E+05 | 4.12E−04 | 7.93E−10 |
| | M103N/I107M | N33Y | 5.50E+05 | 7.55E−04 | 1.37E−09 |
| | I107M | N33Y | 6.05E+05 | 5.45E−04 | 9.01E−10 |
| | M103S/I107M | N33F | 7.22E+05 | 1.12E−03 | 1.55E−09 |
| | M103F/I107M | N33F | 6.51E+05 | 2.75E−04 | 4.23E−10 |
| | M103N/I107M | N33F | 7.38E+05 | 5.86E−04 | 7.94E−10 |
| | I107M | N33F | 7.50E+05 | 4.00E−04 | 5.33E−10 |
| | M103S/I107M | S57L | 3.72E+05 | 7.42E−05 | 1.99E−10 |
| | M103F/I107M | S57L | 3.20E+05 | 3.79E−05 | 1.18E−10 |
| | M103N/I107M | S57L | 3.11E+05 | 4.20E−05 | 1.35E−10 |
| SS-12687 | I107M | S57L | 4.08E+05 | 4.08E−05 | 1.00E−10 |
| SS-15504 | M103S/I107M | Y35H, S57L, S61H | 3.56E+05 | 8.26E−05 | 2.32E−10 |
| SS-15505 | M103F/I107M | Y35H, S57L, S61H | 2.60E+05 | 1.98E−05 | 7.63E−11 |
| SS-15506 | M103N/I107M | Y35H, S57L, S61H | 2.40E+05 | 5.89E−05 | 2.45E−10 |
| SS-15195 | I107M | Y35H, S57L, S61H | 3.25E+05 | 1.98E−05 | 6.11E−11 |
| | WT | N33Y, S57L | 4.62E+05 | 1.10E−03 | 2.37E−09 |
| | M103S/I107M | N33Y, S57L | 6.11E+05 | 7.59E−04 | 1.24E−09 |
| | M103F/I107M | N33Y, S57L | 4.83E+05 | 2.06E−04 | 4.25E−10 |
| | M103N/I107M | N33Y, S57L | 4.96E+05 | 4.39E−04 | 8.84E−10 |
| | I107M | N33Y, S57L | 5.76E+05 | 2.90E−04 | 5.04E−10 |
| SS-15507 | WT | N33F, S57L | 5.87E+35 | 9.86E−04 | 1.68E−09 |
| SS-15503 | M103S/I107M | N33F, S57L | 6.74E+05 | 6.73E−04 | 9.98E−10 |
| SS-15494 | M103F/I107M | N33F, S57L | 6.08E+05 | 1.49E−04 | 2.46E−10 |
| SS-15502 | M103N/I107M | N33F, S57L | 6.81E+05 | 3.38E−04 | 4.96E−10 |
| SS-14892 | I107M | N33F, S57L | 6.31E+05 | 2.23E−04 | 3.53E−10 |
| | M103S/I107M | Y35H, S57L | 3.47E+05 | 7.89E−05 | 2.28E−10 |
| | M103F/I107M | Y35H, S57L | 2.64E+05 | 2.46E−05 | 9.32E−11 |
| | M103N/I107M | Y35H, S57L | 2.52E+05 | 3.42E−05 | 1.35E−10 |
| | I107M | Y35H, S57L | 3.27E+05 | 5.03E−05 | 1.54E−10 |
| | M103S/I107M | S57L, S61H | 3.43E+05 | 6.43E−05 | 1.87E−10 |
| | M103F/I107M | S57L, S61H | 2.64E+05 | 2.60E−05 | 9.85E−11 |
| | M103N/I107M | S57L, S61H | 2.65E+05 | 3.54E−05 | 1.33E−10 |
| | I107M | S57L, S61H | 3.24E+05 | 2.62E−05 | 8.07E−11 |
| | WT | N33Y, Y35H, S57L, S61H | 4.10E+05 | 1.15E−03 | 2.81E−09 |
| | M103S/I107M | N33Y, Y35H, S57L, S61H | 5.94E+05 | 7.58E−04 | 1.28E−09 |
| | M103F/I107M | N33Y, Y35H, S57L, S61H | 4.80E+05 | 2.53E−04 | 5.28E−10 |
| | M103N/I107M | N33Y, Y35H, S57L, S61H | 5.19E+05 | 4.25E−04 | 8.19E−10 |
| | I107M | N33Y, Y35H, S57L, S61H | 5.70E+05 | 3.26E−04 | 5.72E−10 |
| SS-15508 | WT | N33F, Y35H, S57L, S61H | 5.85E+05 | 9.20E−04 | 1.57E−09 |
| SS-15501 | M103S/I107M | N33F, Y35H, S57L, S61H | 7.19E+05 | 5.78E−04 | 8.04E−10 |
| SS-15495 | M103F/I107M | N33F, Y35H, S57L, S61H | 5.34E+05 | 1.52E−04 | 2.85E−10 |
| SS-15500 | M103N/I107M | N33F, Y35H, S57L, S61H | 6.63E+05 | 3.04E−04 | 4.59E−10 |
| SS-15496 | I107M | N33F, Y35H, S57L, S61H | 6.65E+05 | 1.94E−04 | 2.92E−10 |
| SS-14835 | WT | G33 insertion, S57L/L97I, Q98H | 3.06E+05 | 1.63E−04 | 5.34E−10 |
| SS-15497 | M103S/I107M | G33 insertion, S57L/L97I, Q98H | 3.81E+05 | 9.47E−05 | 2.49E−10 |
| SS-15498 | M103F/I107M | G33 insertion, S57L/L97I, Q98H | 3.35E+05 | 4.14E−05 | 1.23E−10 |
| SS-15499 | M103N/I107M | G33 insertion, S57L/L97I, Q98H | 3.01E+05 | 5.98E−05 | 1.99E−10 |
| SS-15196 | I107M | G33 insertion, S57L/L97I, Q98H | 3.77E+05 | 5.06E−05 | 1.34E−10 |

### Example 11

### Binding Kinetics of Anti-PCSK9 8A3 Hot Spot Variants

### First Screen

[0317] In order to determine the binding kinetics for huPCSK9 binding to 8A3 EGAD variants produced as described in Example 7 herein, a primary SPR screen was conducted at 25° C. in a HBS-EP buffer system (10 mM HEPES pH 7.4, 150 mM NaCl, 3.0 mM EDTA and 0.05% Surfactant P20) using a ProteOn XPR36 optical biosensor equipped with a GLC sensor chip (Bio-Rad, Hercules, Calif.). The chip surface was prepared using a goat anti-human IgG capture antibody (Jackson Laboratories; 109-005-098) that was immobilized to all channels in the horizontal direction of the sensor chip using standard amine coupling chemistry to a level of 5,000-6,000 RU. This surface type provided a format for reproducibly capturing fresh analysis antibodies (ligand) after each regeneration step. The 8A3 variants and the control anti-PCSK9 8A3 were captured to channels 1-6 in the vertical direction (˜100-150 RU). Five recombinant hu PCSK9 concentrations ranging from 100 to 1.23 nM (3-fold dilutions) in running buffer were injected simultaneously over the chip surface in the horizontal direction. Blank (buffer) injections were run simultaneously with the five analyte concentrations and used to assess and subtract system artifacts. The association phase were monitored for 300 s, at a flow rate of 50 uL/min, while the dissociation phase were monitored for 1800 s, at a flow rate of 50 uL/min. The surface was regenerated with 10 mM glycine, pH 1.5 for 30 s, at a flow rate of 50 uL/min. The data was aligned, double referenced, and fit to a simple 1:1 binding model using the ProteOn Manager 3.1.0 version 3.1.06 © software (Bio-Rad, Hercules, Calif.).

[0318] From the primary SPR screen of 192, anti-PCSK9 8A3 EGAD variants, 8 variants demonstrated tighter binding, lower K_{d}, compared to the parental 8A3 as shown in Table 11A. In addition, there were 8 variants that demonstrated comparable binding compared to the parental 8A3.

TABLE 11A
anti-PCSK9 8A3 EGAD variants that demonstrate comparable or
enhanced binding to huPCSK9, pH 7.4.

| Li- | | | | | | |
|---|---|---|---|---|---|---|
| gand | mAb ID | LC | HC | ka (1/Ms) | kd (1/s) | Kd (M) |
| 8A3 | SS-8086 | parental | parental | 1.88E+05 | 2.72E−04 | 1.45E−09 |
| P1 F4 | SS-15757 | L97M | parental | 2.38E+05 | 1.77E−04 | 7.44E−10 |
| P1 | SS-15758 | parental | I107L | 2.47E+05 | 2.34E−04 | 9.47E−10 |
| B6 | | | | | | |
| P2 F4 | SS-15759 | G34M | I107M | 3.18E+05 | 1.51E−04 | 4.76E−10 |
| P1B1 | SS-12685 | N33Y | I107M | 3.47E+05 | 7.95E−04 | 2.29E−09 |
| P2 F5 | SS-1268 | N33F | I107M | 5.18E+05 | 5.42E−04 | 1.05E−09 |
| P2 | SS-15761 | G34Q | I107M | 3.23E+05 | 7.07E−05 | 2.19E−10 |
| G5 | | | | | | |
| P2 | SS-12687 | S57L | I107M | 3.06E+05 | 6.14E−05 | 2.00E−10 |
| C6 | | | | | | |
| P2 | SS-15763 | L30M | I107M | 2.64E+05 | 1.17E−04 | 4.41E−10 |
| H7 | | | | | | |
| P2 | SS-15764 | S57I | I107M | 2.87E+05 | 5.83E−05 | 2.03E−10 |
| H8 | | | | | | |

### Second Screen

[0319] The binding kinetics for huPCSK9 binding to the eight 8A3 variants identified in the first screen (Example XXX,) were determined in a SPR screen conducted at 25° C. in a HBS-EP buffer system (10 mM HEPES pH 7.4, 150 mM NaCl, 3.0 mM EDTA and 0.05% Surfactant P20) using a ProteOn XPR36 optical biosensor equipped with a GLC sensor chip (Bio-Rad, Hercules, Calif.). The chip surface was prepared using a goat anti-human IgG capture antibody (Jackson Laboratories; 109-005-098) that was immobilized to all channels in the horizontal direction of the sensor chip using standard amine coupling chemistry to a level of 5,000-6,000 RU. This surface type provided a format for reproducibly capturing fresh analysis antibodies (ligand) after each regeneration step. The 8A3 variants and the control anti-PCSK9 8A3 were captured to channels 1-6 in the vertical direction (˜100-150 RU). Five rhu PCSK9 or recombinant cynomolygous PCSK9 at concentrations ranging from 33 to o.411 nM (3-fold dilutions) in running buffer were injected in triplicate over the chip surface in the horizontal direction. Blank (buffer) injections were run simultaneously with the five analyte concentrations and used to assess and subtract system artifacts. The association phase were monitored for 300 s, at a flow rate of 50 uL/min, while the dissociation phase were monitored for 7200 s, at a flow rate of 50 ul/min. The surface was regenerated with 10 mM glycine, pH 1.5 for 30 s, at a flow rate of 50 uL/min. The data was aligned, double referenced, and fit to a simple 1:1 binding model using the ProteOn Manager 3.1.0 version 3.1.06 © software (Bio-Rad, Hercules, Calif.).

[0320] The binding kinetics between huPCSK9 and cynoPCSK9 were compared as illustrated in Table 11B.

TABLE 11B
Comparison of kinetic rate constants for huPCSK9 and cynoPCSK9
binding to anti-PCSK9 8A3 EGAD variants.

| Ligand | mAb ID | LC alias | HC alias | Analyte | ka 1/Ms | kd 1/s | Kd M |
|---|---|---|---|---|---|---|---|
| 8A3 | SS-8086 | parental | parental | huPCSK9 | 2.08E+05 | 2.55E−04 | 1.23E−09 |
| | | | | cynoPCSK9 | 3.62E+05 | 5.78E−04 | 1.60E−09 |
| P1 F4 | SS-15757 | L97M | parental | huPCSK9 | 2.93E+05 | 1.01E−04 | 3.44E−10 |
| | | | | cynoPCSK9 | 4.85E+05 | 2.84E−04 | 5.85E−10 |
| P1B1 | SS-12685 | N33Y | I107M | huPCSK9 | 6.50E+05 | 1.07E−03 | 1.64E−09 |
| | | | | cynoPCSK9 | 5.96E+05 | 1.42E−03 | 2.37E−09 |
| P1 B6 | SS-15758 | parental | I107L | huPCSK9 | 2.68E+05 | 1.88E−04 | 7.04E−10 |
| | | | | cynoPCSK9 | 4.98E+05 | 4.97E−04 | 9.98E−10 |
| P2 F4 | SS-15759 | G34M | I107M | huPCSK9 | 3.45E+05 | 1.08E−04 | 3.12E−10 |
| | | | | cynoPCSK9 | 6.03E+05 | 2.35E−03 | 3.89E−09 |
| P2 F5 | SS-12686 | N33F | I107M | huPCSK9 | 5.57E+05 | 3.94E−04 | 7.08E−10 |
| | | | | cynoPCSK9 | 1.01E+06 | 4.80E−04 | 4.74E−10 |
| P2 G5 | SS-15761 | G34Q | I107M | huPCSK9 | 3.36E+05 | 3.74E−05 | 1.11E−10 |
| | | | | cynoPCSK9 | 4.98E+05 | 3.84E−03 | 7.71E−09 |
| P2 C6 | SS-12687 | S57L | I107M | huPCSK9 | 3.18E+05 | 3.23E−05 | 1.01E−10 |
| | | | | cynoPCSK9 | 5.83E+05 | 7.06E−05 | 1.21E−10 |
| P2 H7 | SS-15763 | L30M | I107M | huPCSK9 | 2.96E+05 | 8.32E−05 | 2.82E−10 |
| | | | | cynoPCSK9 | 5.78E+05 | 2.14E−04 | 3.70E−10 |
| P2 H8 | SS-15764 | S57I | I107M | huPCSK9 | 3.06E+05 | 4.15E−05 | 1.36E−10 |
| | | | | cynoPCSK9 | 5.58E+05 | 7.76E−05 | 1.39E−10 |

[0321] Binding of anti-PCSK9 antibodies to human PCSK9, given by Table 11C, was measured by solution equilibrium binding assay on KinExA or BIAcore.

[0322] On KinExA, Reacti-Gel 6× (Pierce Biotechnology, Inc. Rockford, Ill.) was pre-coated with 50 μg/mL human PCSK9 in 50 mM Na2CO3, pH 9.6 at 4° C. overnight. PCSK9 coated beads were then blocked with 1 mg/mL BSA (Sigma-Aldrich, St. Louis, Mo.) in 1 M Tris-HCl, pH 7.5 at 4° C. for 2 hours. Prior to analysis, 10 pM and 100 pM of antibody were mixed with increasing concentrations (0.1 pM to 10 nM) of human PCSK9 and equilibrated for 8 hours at room temperature in PBS with 0.1 mg/mL BSA and 0.005% P20. The mixtures were then passed over the PCSK9-coated beads. Since only free antibody molecules can bind to PCSK9-coated beads, binding signal is proportional to the concentration of free antibody at equilibrium with a given PCSK9 concentration. The amount of bead-bound antibody was quantified using fluorescent Cy5-labeled goat anti-human-IgG antibodies (Jackson Immuno Research, West Grove, Pa.) at 2 μg/mL in Super-Block (Pierce Biotechnology, Inc. Rockford, Ill.). The dissociation equilibrium constant (KD) was obtained from nonlinear regression of the competition curves using an n-curve one-site homogeneous binding model provided in the KinExA Pro software (Sapidyne Instruments Inc., Boise, Id.).

[0323] On BIAcore, antibody was immobilized on the second, third or fourth flow cell of a CM5 chip using amine coupling (reagents provided by GE Healthcare, Piscataway, N.J.) with an approximate density of 5000-7000 RU. The first flow cell was used as a background control. For assay at pH 7.4, 0.3, 1.0 or 10 nM of PCSK9 were mixed with serial dilutions of antibody (ranging from 0.0004 nM to 390 nM) in PBS plus 0.1 mg/mL BSA, 0.005% P20 and incubated at room temperature for 4 hours. For assay at pH 5.5, 0.3, 1.0 or 10 nM of PCSK9 were mixed with serial dilutions of antibody (ranging from 0.001 nM to 977 nM) in 10 mM Sodium Citrate, pH 5.5, plus 150 mM NaCl, 0.1 mg/mL BSA, 0.005% P20 and incubated at room temperature for 4 hours. Binding of free PCSK9 in the mixed solutions was measured by injecting over the antibody coated chip surface. One hundred percent PCSK9 binding signal on the antibody surface was determined in the absence of antibody in the solution. A decreased PCSK9 binding response with increasing concentrations of antibody in solution indicated PCSK9 was binding to the antibody in solution, preventing PCSK9 from binding to the immobilized antibody surface. Plotting the PCSK9 binding signal versus antibody concentration, the KD was obtained from nonlinear regression of the competition curves using a one-site homogeneous binding model provided in the KinExA Pro software (Sapidyne Instruments Inc., Boise, Id.).

TABLE 11C
Binding Kinetics of Select 8A3 Variants at pH 5.5 and pH 7.4

| | To huPCSK9-pH 7.4 | | To huPCSK9-pH 5.5 | | |
|---|---|---|---|---|---|
| | KD | 95% CI | KD | 95% CI | pH 5.5/7.4 |
| mAbs | (pM) | (pM) | (pM) | (pM) | KD ratio |
| SS-4201 | 4 | 2~5 | NA | NA | NA |
| (31H4) | | | | | |
| SS-15003 | 7 | 5~9 | 11 | 7~14 | 1.6 |
| (16F12) | | | | | |
| SS-15005 | 78 | 71~86 | 150 | 130~170 | 1.9 |
| (25G4) | | | | | |
| SS-14888 | 48 | 27~72 | 140 | 120~160 | 2.9 |
| (P2C6- | | | | | |
| HLE51) | | | | | |
| SS-12687 | 39 | 25~56 | 150 | 120~190 | 3.8 |
| (P2C6) | | | | | |
| SS-12686 | 410 | 340~510 | 3900 | 3300~4500 | 9.5 |
| P2F5 | | | | | |
| SS-12685 | 740 | 680~810 | 6300 | 5200~7900 | 8.5 |
| (P1B1) | | | | | |

### Example 12

### Binding Kinetics of Anti-PCSK9 31H4 Variants

[0324] In order to determine the binding kinetics of the 31H4 variants described in Example 8 above, at the neutral pH, the biosensor analysis was conducted at 25° C. in a HBS-P buffer system (10 mM HEPES pH 7.4, 150 mM NaCl, and 0.05% Surfactant P20) using a ProteOn XPR36 optical biosensor equipped with a GLC sensor chip (Bio-Rad. Hercules, Calif.). The chip surface was prepared using a goat anti-human IgG capture antibody (Jackson Laboratories; 109-005-098) that was immobilized to all channels in the horizontal direction of the sensor chip using standard amine coupling chemistry to a level of 5,000-6,000 RU. This surface type provided a format for reproducibly capturing fresh analysis antibodies (ligand) after each regeneration step. The 31H4 variants and the control anti-PCSK9 8A3 were captured to channels 1-6 in the vertical direction (˜100-150 RU). Five rhu PCSK9 concentrations ranging from 100 to 1.23 nM (3-fold dilutions) in running buffer were injected simultaneously over the chip surface in the horizontal direction. Blank (buffer) injections were run simultaneously with the five analyte concentrations and used to assess and subtract system artifacts. The association phase were monitored for 300 s, at a flow rate of 50 uL/min, while the dissociation phase were monitored for 1800 s, at a flow rate of 50 uL/min. The surface was regenerated with 10 mM glycine, pH 1.5 for 30 s, at a flow rate of 50 uL/min. The data was aligned, double referenced, and fit to a simple 1:1 binding model using the ProteOn Manager 3.1.0 version 3.1.06 © software (Bio-Rad, Hercules, Calif.).

[0325] In order to determine an estimated complex half-life at the acidic pH, a similar method was used using a HBS-P buffer system (10 mM HEPES pH 5.5, 150 mM NaCl, 0.05% Surfactant P20, and 1 mg/ml BSA). The data was aligned and double referenced using the ProteOn Manager 3.1.0 version 3.1.06 © software (Bio-Rad, Hercules, Calif.) and the variants were qualitatively binned based on their kinetic profile using control antibody 8A3 parental (SS-8086), P1B1 (SS-12685), P2F5 (SS-12686) and P2C6 (SS-12687) of know complex half life.

[0326] The association and dissociation kinetic binding constants (ka, kd), and the dissociation equilibrium binding constant (Kd) for huPCSK9 binding to 92, anti-PCSK9 31H4 His variants at pH 7.4, 25° C. were determined in addition to an estimated complex half-life at pH 5.5, 25° C. The affinity (Kd) at pH 7.4 and the estimated complex half-life for the anti-PCSK9 31H4 variants are shown in FIG. 3.

[0327] A subset of the anti-PCSK9 31H4 His kinetic rate constants are shown in Table 12 that have a dissociation equilibrium binding constant (Kd) at pH 7.4 of <400 pM and an estimate complex half-life at pH 5.5 of <100 s. These variants were carried forward in a confirmatory solution-based SPR assays.

TABLE 12
anti-PCSK9 31H4 His variants with kinetic constants <400 pM, pH 7.4 and <100 s
estimate complex half life, pH 5.5.

| | | | | | | | | estimated |
|---|---|---|---|---|---|---|---|---|
| | | | | | | | | complex |
| | | | | | | | | half life |
| | | LMR | | LMR | ka (1/Ms) | kd (1/s) | Kd (M) | (s) pH |
| SS# | LC | #_LC | HC | #_HC | pH 7.4 | pH 7.4 | pH 7.4 | 5.5 |
| 15121 | parental_LC | C58522 | 61(54), 132(106), | C142656 | 1.47E+06 | 5.63E−04 | 3.83E−10 | 20 |
| | | | parental(113H)_HC | | | | | |
| 15132 | parental_LC | C58522 | 68(58), 132(106), | C142668 | 1.24E+06 | 3.38E−04 | 2.73E−10 | 20 |
| | | | parental(113H)_HC | | | | | |
| 15123 | parental_LC | C58522 | 66(56), 68(58), | C142659 | 1.53E+06 | 4.46E−04 | 2.92E−10 | 50 |
| | | | parental(113H)_HC | | | | | |
| 15124 | parental_LC | C58522 | 66(56), 70(60), | C142660 | 1.60E+06 | 5.25E−04 | 3.27E−10 | 100 |
| | | | parental(113H)_HC | | | | | |
| 15065 | 39(32)_LC | C136714 | 132(106), | C136712 | 1.23E+06 | 3.37E−04 | 2.74E−10 | 100 |
| | | | parental(113H)_HC | | | | | |
| 15114 | parental_LC | C58522 | 39(32), 132(106), | C142649 | 5.55E+05 | 1.50E−04 | 2.71E−10 | 100 |
| | | | parental(113H)_HC | | | | | |
| 15126 | parental_LC | C58522 | 66(56), 73(63), | C142662 | 1.50E+06 | 3.85E−04 | 2.57E−10 | 100 |
| | | | parental(113H)_HC | | | | | |
| 15136 | parental_LC | C58522 | 70(60), 132(106), | C142672 | 1.23E+06 | 2.98E−04 | 2.41E−10 | 100 |
| | | | parental(113H)_HC | | | | | |
| 15117 | parental_LC | C58522 | 61(54), 68(58), | C142652 | 1.64E+06 | 3.90E−04 | 2.38E−10 | 100 |
| | | | parental(113H)_HC | | | | | |
| 15087 | 135(98)_LC | C136716 | 132(106), | C136712 | 1.26E+06 | 2.88E−04 | 2.29E−10 | 100 |
| | | | parental(113H)_HC | | | | | |
| 15133 | parental_LC | C58522 | 68(58), 133(107), | C142669 | 1.28E+06 | 2.91E−04 | 2.28E−10 | 100 |
| | | | parental(113H)_HC | | | | | |
| 15139 | parental_LC | C58522 | 72(62), 132(106), | C142675 | 1.31E+06 | 2.48E−04 | 1.90E−10 | 100 |
| | | | parental(113-H)_HC | | | | | |
| 15141 | parental_LC | C58522 | 73(63), 132(106), | C142677 | 1.38E+06 | 2.55E−04 | 1.85E−10 | 100 |
| | | | parental(113H)_HC | | | | | |
| 15106 | parental_LC | C58522 | 31(29), 132(106), | C142641 | 1.37E+06 | 1.38E−04 | 1.00E−10 | 100 |
| | | | parental(113H)_HC | | | | | |

### 13

### Binding Kinetics of Anti-PCSK9 8A3 Constant Region Variants

[0328] Binding of anti-PCSK9 antibodies, 8A3 (SS-8086), 8A3HLE51 (mAb ID SS-13406) and 8A3HLE112 (mAb ID SS-13407), to human and cynomolgus monkey PCSK9, was measured by solution equilibrium binding assay on BIAcore. Antibody was immobilized on the second flow cell of a CM5 chip using amine coupling (reagents provided by GE Healthcare, Piscataway, N.J.) with an approximate density of 5000 RU. The first flow cell was used as a background control. For assay at pH 7.4, 1.0 nM of PCSK9 were mixed with serial dilutions of antibody (ranging from 0.07 nM to 150 nM) in PBS plus 0.1 mg/mL BSA, 0.005% P20 and incubated at room temperature for 4 hours. For assay at pH 5.5, 1.0 nM of PCSK9 were mixed with serial dilutions of antibody (ranging from 0.07 nM to 450 nM) in 10 mM Sodium Citrate, pH 5.5, plus 150 mM NaCl, 0.1 mg/mL BSA, 0.005% P20 and incubated at room temperature for 4 hours. Binding of free PCSK9 in the mixed solutions was measured by injecting over the antibody coated chip surface. One hundred percent PCSK9 binding signal on the antibody surface was determined in the absence of antibody in the solution. A decreased PCSK9 binding response with increasing concentrations of antibody in solution indicated PCSK9 was binding to the antibody, preventing PCSK9 from binding to the immobilized antibody surface. Plotting the PCSK9 binding signal versus antibody concentration, the K, was obtained from nonlinear regression of the competition curves using a one-site homogeneous binding model provided in the KinExA Pro software (Sapidyne Instruments Inc., Boise, Id.). The results are presented in Table 13A below.

TABLE 13A
Analysis of the binding of 8A3 variants to human
PCSK9 by solution based equilibrium assay

| | | KD | 95% CI | KD Ratio |
|---|---|---|---|---|
| | | (pM) | (pM) | pH 5.5/pH 7.4 |
| 8A3 to huPCSK9 | pH 7.4 | 480 | 430~540 | |
| | pH 5.5 | 3000 | 2400~3800 | 6.3 |
| 8A3 to cyPCSK9 | pH 7.4 | 1400 | 1200~1500 | |
| | pH 5.5 | 27000 | 23000~32000 | 19.3 |
| 8A3 HLE51 to | pH 7.4 | 410 | 360~460 | |
| huPCSK9 | pH 5.5 | 2200 | 2100~2300 | 5.4 |
| 8A3 HLE51 to | pH 7.4 | 1100 | 1100~1200 | |
| cyPCSK9 | pH 5.5 | 14000 | 11000~17000 | 12.7 |
| 8A3 HLE112 to | pH 7.4 | 410 | 390~430 | |
| huPCSK9 | pH 5.5 | 2000 | 1500~2500 | 4.9 |
| 8A3 HLE112 to | pH 7.4 | 1100 | 1000~1100 | |
| cyPCSK9 | pH 5.5 | 20000 | 18000~23000 | 18.2 |

[0329] Binding Kinetics of Constant Region Antibody Variants to FcRn

[0330] Binding of anti-PCSK9 antibodies to human and cyno FcRn was tested on BIAcore T200 at pH 5.5. Briefly, CHO huFc was immobilized on the flow cell 2 of a CM5 chip using amine coupling with density around 5000 RU. Flow cell 1 was used as a background control. 10 nM of human or cyno FcRn was mixed with a serial dilutions of the antibodies (ranged from 0.1˜2,000 nM) and incubated for 1 hour at room temperature in 10 mM sodium acetate, pH 5.5, 150 mM NaCl, 0.005% P20, 0.1 mg/ml BSA. Binding of the free FcRn to immobilized CHO huFc were measured by injecting the mixture over the surfaces. 100% FcRn binding signal was determined in the absence of antibodies in solution. A decreased FcRn binding response with increasing concentrations of antibodies indicated that FcRn bound to the antibodies in solution, which blocked FcRn from binding to the immobilized Fc surfaces. Plotting the FcRn binding signal versus antibody concentrations, EC₅₀ was calculated using nonlinear regression of one-site competition in GraphPad Prism 5™ software. The results are presented in Table 13B below.

TABLE 13B
Analysis of the binding of 8A3 variants to
FcRn by solution based equilibrium assay

| | To huFcRn | | | To cyFcRn | | |
|---|---|---|---|---|---|---|
| | | 8A3 | 8A3 | | 8A3 | 8A3 |
| at pH 5.5 | 8A3 | HLE51 | HLE112 | 8A3 | HLE51 | HLE112 |
| EC50 | 250 | 17 | 15 | 270 | 16 | 16 |
| (nM) | | | | | | |
| 95% CI | 170-370 | 8.5-33 | 8-26 | 150-470 | 9.4-28 | 9.4-28 |
| (nM) | | | | | | |

### Example 14

### Antibody Variant the Effect of PCSK9 to Block LDL Uptake in Human HepG2 Cells

[0331] This example demonstrates the ability of antigen binding protein of the invention to reduce LDL uptake by cells. Human HepG2 cells were seeded in black, clear bottom 96-well plates (Costar) at a concentration of 2.5×10⁵ cells per well in DMEM medium (Mediatech, Inc) supplemented with 10% FBS and incubated at 37° C. (5% CO2) overnight. To form the PCSK9 and antibody complex, 2 μg/ml of D374Y human PCSK9 was incubated with various concentrations of P2C6 IgG2 antibody (SS-12687) diluted in uptake buffer (DMEM with 1% FBS) or uptake buffer alone (control) for 1 hour at room temperature. After washing the cells with PBS, the D374Y PCSK9/antibody mixture was transferred to the cells, followed by adding LDL-BODIPY (Life Technologies) diluted in uptake buffer at a final concentration of 6 μg/ml. After incubation for 3 hours at 37° C. (5% CO2), cells were washed thoroughly with PBS and the cell fluorescence signal was detected by Safire™ (TECAN) at 480-520 nm (excitation) and 520-600 nm (emission).

[0332] The results of the cellular uptake assay are shown in FIG. 5A-B. Summarily, EC₅₀ values were determined for the antibody variant and found to be 11.1 nM for P2C6 IgG2 (FIG. 4). These results demonstrate that the applied antigen binding proteins can reduce the effect of PCSK9 to block LDL uptake by cells.

### Example 15

### Serum Cholesterol Lowering Effect and Pharmacokinetics of Antibodies P1B1, P2C6, and P2F5 in a 51 Day Study

[0333] In order to assess total serum cholesterol (TC) lowering in cynomolgus macaques via antibody therapy against PCSK9 protein in a 51 day study, the following procedure was performed.

[0334] Male cynomolgus macaques (4-6 kg) were fed a normal chow diet throughout the duration of the experiment. Animals were administered either an anti-PCSK9 antibody P1B1 (SS-12685), P2C6 (SS-12687), P2F5 (SS-12685), 8A3 (SS-8086) (positive control), 31H4 (SS-4201) (positive control) or negative control antibody anti-KLH at a dose of 0.5 mg/kg through subcutaneous injection at T=0.

[0335] Dosing groups are shown in Table 15A. Serum was collected at the time points indicated in FIG. 6.

TABLE 15A

| Group | Treatment | Number | Dose |
|---|---|---|---|
| A | P1B1 | 5 | 0.5 mg/kg |
| B | P2C6 | 5 | 0.5 mg/kg |
| C | P2F5 | 5 | 0.5 mg/kg |
| D | 31H4 | 5 | 0.5 mg/kg |
| E | 8A3 | 5 | 0.5 mg/kg |
| F | Anti-KLH | 5 | 0.5 mg/kg |

[0336] Animals dosed at 0.5 mg/kg demonstrated a drop in LDL cholesterol beginning one day post-treatment. LDL cholesterol (LDL-C) in the 31H4 antibody group began returning to pre-dose levels on day 6 and completely returned to baseline levels by day 9. P2C6 exhibited the next shortest duration in LDL-C lowering. P2C6 began returning to pre-dose levels on day 15 and completely returned to baseline levels by day 21. The other anti-PCSK9 antibodies tested (8A3, P1B1, and P2F5) exhibited a more gradual return to pre-dosing levels. The duration of LDL cholesterol lowering for each antibody was consistent with its pharmacokinetic behavior, as shown in FIG. 7A-B. For 31H4, shorter duration of action corresponded to lower AUC exposure and shorter apparent terminal half-life compared to other anti-PCSK9 antibodies and anti-KLH control (TABLE 15B). The increased duration of pharmacological effect for P2C6 relative to 31H4 was associated with a 3× increase in AUC exposure and apparent terminal half-life. Pharmacokinetics of P1B1 and P2F5 were very similar to each other, and were consistent with prolonged pharmacological effect compared to 31H4 and P2C6. AUC exposure of 8A3 was indistinguishable from anti-KLH control, though the anti-PCSK9 8A3 antibody exhibited prolonged LDL-cholesterol lowering while the control anti-KLH had no effect on LDL-cholesterol.

TABLE 15B

| | t_{1/2, z} | Cₘₐₓ | Tₘₐₓ | AUC_{inf} |
|---|---|---|---|---|
| Antibody | (h) | (ng/mL) | (h) | (μg · h/mL) |
| Anti-KLH | 456 ± 89 | 6,920 ± 970 | 43 ± 20 | 4,030 ± 790 |
| 31H4 | 48.8 ± 18.2 | 4,840 ± 620 | 24 ± 0 | 370 ± 50 |
| 8A3 | 344 ± 71 | 9,270 ± 270 | 43 ± 11 | 4,180 ± 700 |
| P1B1 | 234 ± 50 | 7,350 ± 1,180 | 62 ± 27 | 2,700 ± 800 |
| P2F5 | 254 ± 137 | 6,090 ± 700 | 43 ± 11 | 2,110 ± 500 |
| P2C6 | 146 ± 44 | 6,640 ± 680 | 34 ± 13 | 1,170 ± 120 |

### Example 16

### Serum Cholesterol Lowering Effect and Pharmacokinetics of Antibodies 8A3, 8A3 5-51, and 8A3 5-112 in an 84 Day Study

[0337] In order to assess serum cholesterol lowering in cynomolgus macaques via antibody therapy against PCSK9 protein in an 84 day study, the following procedure was performed.

[0338] Male cynomolgus macaques (˜3 kg) were fed a normal chow diet throughout the duration of the experiment. Animals were administered either an anti-PCSK9 antibody 8A3 (SS-8086) 8A3 5-51 (mAb ID SS-13406), 8A3 5-112 (mAb ID SS-13407) or negative control antibody anti-KLH, at a dose of 1 mg/kg through intravenous injection at T=0.

[0339] Dosing groups are shown in Table 16A. Serum was collected at the time points 0.25, 1, 4, 24, 72, 168, 240, 336, 408, 504, 576, 672, 744, 840, 1008, 1176, 1344, 1512 and 1680 hours post dose.

TABLE 16A

| Group | Treatment | Number | Dose |
|---|---|---|---|
| 1 | Anti-KLH | 4 | 1 mg/kg |
| 2 | 8A3 | 4 | 1 mg/kg |
| 3 | 8A3 5-51 | 4 | 1 mg/kg |
| 4 | 8A3 5-112 | 4 | 1 mg/kg |

[0340] Animals dosed at 1 mg/kg demonstrated a drop in LDL-C cholesterol beginning 24 hours (1 day) post-treatment. LDL-C in the 8A3 antibody group began returning to pre-dose levels at 504 hours (21 days) and completely returned to baseline levels by 744 hours (31 days). Relative to 8A3, both 8A3 5-51 and 5-112 dose groups showed prolongation of pharmacological effect. LDL-C in the 8A3 5-51 and 5-112 antibody dose groups began returning to pre-dose levels at 672 hours (28 days) and 1008 hours (42 days), respectively. Return to baseline was observed at 1008 hours (42 days) and 1848 hours (77 days) for 8A3 5-51 and 5-112, respectively. The duration of LDL-C lowering for each antibody was consistent with its pharmacokinetic behavior, as shown in FIG. 8. The 8A3 antibody exhibited pharmacokinetics that were similar to the anti-KLH control; AUC exposures were equivalent and apparent terminal half-life for 8A3 was 67% of anti-KLH (TABLE 16B). Consistent with its improved duration of pharmacological effect, the 8A3 5-51 antibody displayed increased AUC exposure (2.0×), lower clearance (53%), and prolonged terminal half-life (1.9×) compared to 8A3. Pharmacokinetic behavior of 8A3 5-112 was similar to 8A3 5-51.

TABLE 16B

| Anti- | t_{1/2, z} | CL | Vₛₛ | AUC_{inf} |
|---|---|---|---|---|
| body | (h) | (mL/h/kg) | (mL/kg) | (μg · h/mL) |
| Anti- | 349 ± 97 | 0.164 ± 0.024 | 68.0 ± 4.2 | 6,190 ± 1,020 |
| KLH | | | | |
| 8A3 | 234 ± 104 | 0.174 ± 0.053 | 52.9 ± 12.1 | 6,160 ± 1,780 |
| 8A3 | 437 ± 203 | 0.0825 ± 0.0063 | 52.3 ± 11.2 | 12,200 ± 900 |
| 5-51 | | | | |
| 8A3 | 375 ± 241 | 0.104 ± 0.028 | 56.0 ± 7.4 | 10,200 ± 2,900 |
| 5-112 | | | | |

[0341] Each reference cited herein is incorporated by reference in its entirety for all that it teaches and for all purposes.

[0342] The present disclosure is not to be limited in scope by the specific embodiments described herein, which are intended as illustrations of individual aspects of the disclosure, and functionally equivalent methods and components form aspects of the disclosure. Indeed, various modifications of the disclosure, in addition to those shown and described herein will become apparent to those skilled in the art from the foregoing description and accompanying drawings. Such modifications are intended to fall within the scope of the appended claims.

The application's sequence listing, which the Patent Office published only in electronic form, follows.

SEQUENCE LISTING (1029 sequences)

SEQ ID NO: 1 - DNA, 2076 bp, Homo sapiens
atgggcaccgtcagctccaggcggtcctggtggccgctgccactgctgctgctgctgctgctgctcctgggtcccgcgggcgcccgtgcgcaggaggacgaggacggcgactacgaggagctggtgctagccttgcgctccgaggaggacggcctggccgaagcacccgagcacggaaccacagccaccttccaccgctgcgccaaggatccgtggaggttgcctggcacctacgtggtggtgctgaaggaggagacccacctctcgcagtcagagcgcactgcccgccgcctgcaggcccaggctgcccgccggggatacctcaccaagatcctgcatgtcttccatggccttcttcctggcttcctggtgaagatgagtggcgacctgctggagctggccttgaagttgccccatgtcgactacatcgaggaggactcctctgtctttgcccagagcatcccgtggaacctggagcggattacccctccgcggtaccgggcggatgaataccagccccccgacggaggcagcctggtggaggtgtatctcctagacaccagcatacagagtgaccaccgggaaatcgagggcagggtcatggtcaccgacttcgagaatgtgcccgaggaggacgggacccgcttccacagacaggccagcaagtgtgacagtcatggcacccacctggcaggggtggtcagcggccgggatgccggcgtggccaagggtgccagcatgcgcagcctgcgcgtgctcaactgccaagggaagggcacggttagcggcaccctcataggcctggagtttattcggaaaagccagctggtccagcctgtggggccactggtggtgctgctgcccctggcgggtgggtacagccgcgtcctcaacgccgcctgccagcgcctggcgagggctggggtcgtgctggtcaccgctgccggcaacttccgggacgatgcctgcctctactccccagcctcagctcccgaggtcatcacagttggggccaccaatgcccaggaccagccggtgaccctggggactttggggaccaactttggccgctgtgtggacctctttgccccaggggaggacatcattggtgcctccagcgactgcagcacctgctttgtgtcacagagtgggacatcacaggctgctgcccacgtggctggcattgcagccatgatgctgtctgccgagccggagctcaccctggccgagttgaggcagagactgatccacttctctgccaaagatgtcatcaatgaggcctggttccctgaggaccagcgggtactgacccccaacctggtggccgccctgccccccagcacccatggggcaggttggcagctgttttgcaggactgtgtggtcagcacactcggggcctacacggatggccacagccatcgcccgctgcgccccagatgaggagctgctgagctgctccagtttctccaggagtgggaagcggcggggcgagcgcatggaggcccaagggggcaagctggtctgccgggcccacaacgcttttgggggtgagggtgtctacgccattgccaggtgctgcctgctaccccaggccaactgcagcgtccacacagctccaccagctgaggccagcatggggacccgtgtccactgccaccaacagggccacgtcctcacaggctgcagctcccactgggaggtggaggaccttggcacccacaagccgcctgtgctgaggccacgaggtcagcccaaccagtgcgtgggccacagggaggccagcatccacgcttcctgctgccatgccccaggtctggaatgcaaagtcaaggagcatggaatcccggcccctcaggggcaggtgaccgtggcctgcgaggagggctggaccctgactggctgcagcgccctccctgggacctcccacgtcctgggggcctacgccgtagacaacacgtgtgtagtcaggagccgggacgtcagcactacaggcagcaccagcgaagaggccgtgacagccgttgccatctgctgccggagccggcacctggcgcaggcctcccaggagctccag

SEQ ID NO: 2 - protein, 692 aa, Homo sapiens
MGTVSSRRSWWPLPLLLLLLLLLGPAGARAQEDEDGDYEELVLALRSEEDGLAEAPEHGTTATFHRCAKDPWRLPGTYVVVLKEETHLSQSERTARRLQAQAARRGYLTKILHVFHGLLPGFLVKMSGDLLELALKLPHVDYIEEDSSVFAQSIPWNLERITPPRYRADEYQPPDGGSLVEVYLLDTSIQSDHREIEGRVMVTDFENVPEEDGTRFHRQASKCDSHGTHLAGVVSGRDAGVAKGASMRSLRVLNCQGKGTVSGTLIGLEFIRKSQLVQPVGPLVVLLPLAGGYSRVLNAACQRLARAGVVLVTAAGNFRDDACLYSPASAPEVITVGATNAQDQPVTLGTLGTNFGRCVDLFAPGEDIIGASSDCSTCFVSQSGTSQAAAHVAGIAAMMLSAEPELTLAELRQRLIHFSAKDVINEAWFPEDQRVLTPNLVAALPPSTHGAGWQLFCRTVWSAHSGPTRMATAIARCAPDEELLSCSSFSRSGKRRGERMEAQGGKLVCRAHNAFGGEGVYAIARCCLLPQANCSVHTAPPAEASMGTRVHCHQQGHVLTGCSSHWEVEDLGTHKPPVLRPRGQPNQCVGHREASIHASCCHAPGLECKVKEHGIPAPQGQVTVACEEGWTLTGCSALPGTSHVLGAYAVDNTCVVRSRDVSTTGSTSEEAVTAVAICCRSRHLAQASQELQ

SEQ ID NO: 3 - DNA, 2076 bp, Macaca fascicularis
atgggtaccgtcagctccaggcggtcctggtggcctctgccgctgccactgctgctgctcctgctcctgggtcccgctggcgcccgtgcgcaggaggacgaggacggcgactacgaggagctggtgctagccttgcgttccgaggaggacggcctggccgacgcacccgagcacggagccacagccaccttccaccgctgcgccaaggatccgtggaggttgcccggcacctacgtggtggtgctgaaggaggagacccaccgctcgcagtcagagcgcactgcccgccgcctgcaggcccaagctgcccgccggggatacctcaccaagatcctgcatgtcttccatcaccttcttcctggcttcctggtgaagatgagtggcgacctgctggagctggccctgaagttgccccatgtcgactacatcgaggaggactcctctgtcttcgcccagagcatcccatggaacctggagcgaattactcctgcacggtaccgggcggatgaataccagccccccaaaggaggcagcctggtggaggtgtatctcctagacaccagcatacagagtgaccaccgggaaatcgagggcagggtcatggtcaccgacttcgagagtgtgcccgaggaggacgggacccgcttccacagacaggccagcaagtgtgacagccatggcacccacctggcaggggtggtcagcggccgggatgccggcgtggccaagggcgccggcctgcgtagcctgcgcgtgctcaactgccaagggaagggcacggtcagcggcaccctcataggcctggagtttattcggaaaagccagctggtccagcccgtggggccactggttgtgctgctgcccctggcgggtgggtacagccgggtcttcaacgccgcctgccagcgcctggcgagggctggggtcgtgctggtcaccgctgccggcaacttccgggacgatgcctgcctctactctccagcctcggctcccgaggtcatcacagttggggccaccaatgcccaggaccagccggtgaccctggggactttggggaccaactttggccgctgtgtggacctctttgccccaggggaggacatcattggtgcctccagcgactgcagcacctgctttgtgtcacggagtgggacatcgcaggctgctgcccacgtggctggcattgcagccatgatgctgtctgccgagccggagctcactctggccgagttgaggcagagactgatccacttctctgccaaagatgtcatcaatgaggcctggttccctgaggaccagcgggtactgacccccaacctggtggccgccctgccccccagcacccacagggcaggttggcagctgttttgcaggactgtgtggtcagcacactcgggtcctacacggatggccacagccgtagcccgctgcgcccaggatgaggagctgctgagctgctccagtttctccaggagtgggaagcggcggggcgagcgcatcgaggcccaagggggcaagcgggtctgccgggcccacaacgcttttgggggtgagggtgtctacgccattgccaggtgctgcctgctaccccaggtcaactgcagcgtccacacagctccaccagctggggccagcatggggacccgtgtccactgccatcagcagggccacgtcctcacaggctgcagctcccactgggaggtggaggaccttggcacccacaagccgcctgtgctgaggccacgaggtcagcccaaccagtgtgtgggccacagggaggccagcatccacgcttcctgctgccatgccccaggtctggaatgcaaagtcagggagcatggaatcccggcccctcaggagcaggttatcgtggcctgtgaggacggctggaccctgaccggctgcagtgccctccctgggacctcccatgtcctgggggcctacgctgtagacaacacgtgtgtggtcaggagccgggacgtcagcaccacaggcagcaccagcgaagaagccgtggcagccgttgccatctgctgccggagccggcacctggtgcaggcctcccaggagctccag

SEQ ID NO: 4 - protein, 692 aa, Macaca fascicularis
MGTVSSRRSWWPLPLPLLLLLLLGPAGARAQEDEDGDYEELVLALRSEEDGLADAPEHGATATFHRCAKDPWRLPGTYVVVLKEETHRSQSERTARRLQAQAARRGYLTKILHVFHHLLPGFLVKMSGDLLELALKLPHVDYIEEDSSVFAQSIPWNLERITPARYRADEYQPPKGGSLVEVYLLDTSIQSDHREIEGRVMVTDFESVPEEDGTRFHRQASKCDSHGTHLAGVVSGRDAGVAKGAGLRSLRVLNCQGKGTVSGTLIGLEFIRKSQLVQPVGPLVVLLPLAGGYSRVFNAACQRLARAGVVLVTAAGNFRDDACLYSPASAPEVITVGATNAQDQPVTLGTLGTNFGRCVDLFAPGEDIIGASSDCSTCFVSRSGTSQAAAHVAGIAAMMLSAEPELTLAELRQRLIHFSAKDVINEAWFPEDQRVLTPNLVAALPPSTHRAGWQLFCRTVWSAHSGPTRMATAVARCAQDEELLSCSSFSRSGKRRGERIEAQGGKRVCRAHNAFGGEGVYAIARCCLLPQVNCSVHTAPPAGASMGTRVHCHQQGHVLTGCSSHWEVEDLGTHKPPVLRPRGQPNQCVGHREASIHASCCHAPGLECKVREHGIPAPQEQVIVACEDGWTLTGCSALPGTSHVLGAYAVDNTCVVRSRDVSTTGSTSEEAVAAVAICCRSRHLVQASQELQ

SEQ ID NO: 5 - protein, 326 aa, ARTIFICIAL SEQUENCE
  iGg2 Heavy Constant Domain of an Exemplary Monoclonal Antibody
ASTKGPSVFPLAPCSRSTSESTAALGCLVKDYFPEPVTVSWNSGALTSGVHTFPAVLQSSGLYSLSSVVTVPSSNFGTQTYTCNVDHKPSNTKVDKTVERKCCVECPPCPAPPVAGPSVFLFPPKPKDTLMISRTPEVTCVVVDVSHEDPEVQFNWYVDGVEVHNAKTKPREEQFNSTFRVVSVLTVVHQDWLNGKEYKCKVSNKGLPAPIEKTISKTKGQPREPQVYTLPPSREEMTKNQVSLTCLVKGFYPSDIAVEWESNGQPENNYKTTPPMLDSDGSFFLYSKLTVDKSRWQQGNVFSCSVMHEALHNHYTQKSLSLSPGK

SEQ ID NO: 6 - protein, 107 aa, ARTIFICIAL SEQUENCE [sequence omitted]

SEQ ID NO: 7 - protein, 105 aa, ARTIFICIAL SEQUENCE
  Lambda Light Constant Domain of an Exemplary Monoclonal Antibody
QPKANPTVTLFPPSSEELQANKATLVCLISDFYPGAVTVAWKADGSPVKAGVETTKPSKQSNNKYAASSYLSLTPEQWKSHRSYSCQVTHEGSTVEKTVAPTECS

SEQ ID NO: 8 - protein, 241 aa, ARTIFICIAL SEQUENCE
  Exemplary Antibody Light Chain Sequences
MDMRVPAQLLGLLLLWLRGARCDIVMTQSPLSLPVTPGEPASISCRSSQSLLHSNGYNYLDWYLQKPGQSPQLLIYLGSNRASGVPDRFSGSGSGTDFTLKISRVEAEDVGVYYCMQALQTPLTFGGGTKVEIKRTVAAPSVFIFPPSDEQLKSGTASVVCLLNNFYPREAKVQWKVDNALQSGNSQESVTEQDSKDSTYSLSSTLTLSKADYEKHKVYACEVTHQGLSSPVTKSFNRGEC

SEQ ID NO: 9 - protein, 241 aa, ARTIFICIAL SEQUENCE; identical to SEQ ID NO: 8
  Exemplary Antibody Light Chain Sequences

SEQ ID NO: 10 - protein, 241 aa, ARTIFICIAL SEQUENCE
  Exemplary Antibody Light Chain Sequences
MDMRVPAQLLGLLLLWLRGARCDIVMTQSPLSLPVTPGEPASISCRSSQSLLHSNGYNYLDWYLQKPGQSPQLLIYLGLNRASGVPDRFSGSGSGTDFTLKISRVEAEDVGVYYCMQALQTPLTFGGGTKVEIKRTVAAPSVFIFPPSDEQLKSGTASVVCLLNNFYPREAKVQWKVDNALQSGNSQESVTEQDSKDSTYSLSSTLTLSKADYEKHKVYACEVTHQGLSSPVTKSFNRGEC

SEQ ID NO: 11 - protein, 217 aa, ARTIFICIAL SEQUENCE
  Exemplary Antibody Light Chain Sequences
QSVLTQPPSVSGAPGQRVTISCTGSRSNIGAGYDVNWYQQLPGTAPKLLIYGNSNRPSGVPDRFSGSKSGTSASLVITGLQAEDEADYYCQSYDSNLSGSVFGGGTKLTVLGQPKANPTVTLFPPSSEELQANKATLVCLISDFYPGAVTVAWKADGSPVKAGVETTKPSKQSNNKYAASSYLSLTPEQWKSHRSYSCQVTHEGSTVEKTVAPTECS

SEQ ID NO: 12 - protein, 221 aa, ARTIFICIAL SEQUENCE
  Exemplary Antibody Light Chain Sequences
DIVLTQSPDFLAVSLGERATINCKSSQNVLYSSSNKNYLVWYQHKPGQPPKLLIYWASTRESGVPDRFSGSGSGTDFTLTISSLQAEDVAVYYCHQYYSTPWTFGQGTKVEIKRRTVAAPSVFIFPPSDEQLKSGTASVVCLLNNFYPREAKVQWKVDNALQSGNSQESVTEQDSKDSTYSLSSTLTLSKADYEKHKVYACEVTHQGLSSPVTKSFNRGEC

SEQ ID NO: 13 - protein, 216 aa, ARTIFICIAL SEQUENCE
  Exemplary Antibody Light Chain Sequences
QSVLTQPPSASGTPGQRVTISCSGSNSNIGSNTVNWYQQVPGTAPKLLIYSNNQRPSGVPDRFSGSKSGTSASLAISGLQSEDEADYYCAAWDDSLNGWVFGGGTKLTVLGQPKANPTVTLFPPSSEELQANKATLVCLISDFYPGAVTVAWKADGSPVKAGVETTKPSKQSNNKYAASSYLSLTPEQWKSHRSYSCQVTHEGSTVEKTVAPTECS

SEQ ID NO: 14 - protein, 215 aa, ARTIFICIAL SEQUENCE
  Exemplary Antibody Light Chain Sequences
QSALTQPASVSGSPGQSITISCTGTSSDVGGYNSVSWYQQHPGKPPKLMIYEVSNRPSGISNRFSGSKSGNTASLTISGLQAEDEADYFCSSYTSTSMVFGGGTKLAVLRQPKANPTVTLFPPSSEELQANKATLVCLISDFYPGAVTVAWKADGSPVKAGVETTKPSKQSNNKYAASSYLSLTPEQWKSHRSYSCQVTHEGSTVEKTVAPTECS

SEQ ID NO: 15 - protein, 215 aa, ARTIFICIAL SEQUENCE
  Exemplary Antibody Light Chain Sequences
QSALTQPASVSGSPGQSITISCTGTSSDVGGYNSVSWYQQHPGKPPKLMIYEVSNRPSGVSNRFSGSKSANTASLTISGLQADDEADYFCSSYTSTSMVFGGGTKLTVLRQPKANPTVTLFPPSSEELQANKATLVCLISDFYPGAVTVAWKADGSPVKAGVETTKPSKQSNNKYAASSYLSLTPEQWKSHRSYSCQVTHEGSTVEKTVAPTECS

SEQ ID NO: 16 - protein, 239 aa, ARTIFICIAL SEQUENCE
  Exemplary Antibody Light Chain Sequences
MDMRVPAQLLGLLLLWLRGARCESVLTQPPSVSGAPGQRVTISCTGSSSNIGAGHDVHWYQQLPGTAPKLLISGNSNRPSGVPDRFSGSKSGTSASLAITGLQAEDEADYYCQSYDSSLSGSVFGGGTKLTVLGQPKAAPSVTLFPPSSEELQANKATLVCLISDFYPGAVTVAWKADSSPVKAGVETTTPSKQSNNKYAASSYLSLTPEQWKSHRSYSCQVTHEGSTVEKTVAPTECS

SEQ ID NO: 17 - protein, 239 aa, ARTIFICIAL SEQUENCE; identical to SEQ ID NO: 16
  Exemplary Antibody Light Chain Sequences

SEQ ID NO: 18 - protein, 239 aa, ARTIFICIAL SEQUENCE; identical to SEQ ID NO: 16
  Exemplary Antibody Light Chain Sequences

SEQ ID NO: 19 - protein, 239 aa, ARTIFICIAL SEQUENCE; identical to SEQ ID NO: 16
  Exemplary Antibody Light Chain Sequences

SEQ ID NO: 20 - protein, 239 aa, ARTIFICIAL SEQUENCE
  Exemplary Antibody Light Chain Sequences
MDMRVPAQLLGLLLLWLRGARCESVLTQPPSVSGAPGQRVTISCTGSSSNIGAGYDVHWYQQLPGTAPKLLISGNSNRPSGVPDRFSGSKSGTSASLAITGLQAEDEADYYCQSYDSSLHGSVFGGGTKLTVLGQPKAAPSVTLFPPSSEELQANKATLVCLISDFYPGAVTVAWKADSSPVKAGVETTTPSKQSNNKYAASSYLSLTPEQWKSHRSYSCQVTHEGSTVEKTVAPTECS

SEQ ID NO: 21 - protein, 239 aa, ARTIFICIAL SEQUENCE; identical to SEQ ID NO: 20
  Exemplary Antibody Light Chain Sequences

SEQ ID NO: 22 - protein, 239 aa, ARTIFICIAL SEQUENCE; identical to SEQ ID NO: 20
  Exemplary Antibody Light Chain Sequences

SEQ ID NO: 23 - protein, 239 aa, ARTIFICIAL SEQUENCE
  Exemplary Antibody Light Chain Sequences
MDMRVPAQLLGLLLLWLRGARCESVLTQPPSVSGAPGQRVTISCTGSSSNIGAGYDVHWYQQLPGTAPKLLISGNSNRPSGVPDRFSGSKSGTSASLAITGLQAEDEADYYCQSYDSSLSGSVFGGGTKLTVLGQPKAAPSVTLFPPSSEELQANKATLVCLISDFYPGAVTVAWKADSSPVKAGVETTTPSKQSNNKYAASSYLSLTPEQWKSHRSYSCQVTHEGSTVEKTVAPTECS

SEQ ID NO: 24 - protein, 239 aa, ARTIFICIAL SEQUENCE; identical to SEQ ID NO: 23
  Exemplary Antibody Light Chain Sequences

SEQ ID NO: 25 - protein, 239 aa, ARTIFICIAL SEQUENCE; identical to SEQ ID NO: 23
  Exemplary Antibody Light Chain Sequences

SEQ ID NO: 26 - protein, 239 aa, ARTIFICIAL SEQUENCE; identical to SEQ ID NO: 23
  Exemplary Antibody Light Chain Sequences

SEQ ID NO: 27 - protein, 239 aa, ARTIFICIAL SEQUENCE; identical to SEQ ID NO: 23
  Exemplary Antibody Light Chain Sequences

SEQ ID NO: 28 - protein, 239 aa, ARTIFICIAL SEQUENCE; identical to SEQ ID NO: 23
  Exemplary Antibody Light Chain Sequences

SEQ ID NO: 29 - protein, 239 aa, ARTIFICIAL SEQUENCE; identical to SEQ ID NO: 23
  Exemplary Antibody Light Chain Sequences

SEQ ID NO: 30 - protein, 239 aa, ARTIFICIAL SEQUENCE; identical to SEQ ID NO: 23
  Exemplary Antibody Light Chain Sequences

SEQ ID NO: 31 - protein, 239 aa, ARTIFICIAL SEQUENCE; identical to SEQ ID NO: 23
  Exemplary Antibody Light Chain Sequences

SEQ ID NO: 32 - protein, 239 aa, ARTIFICIAL SEQUENCE; identical to SEQ ID NO: 23
  Exemplary Antibody Light Chain Sequences

SEQ ID NO: 33 - protein, 239 aa, ARTIFICIAL SEQUENCE; identical to SEQ ID NO: 23
  Exemplary Antibody Light Chain Sequences

SEQ ID NO: 34 - protein, 239 aa, ARTIFICIAL SEQUENCE; identical to SEQ ID NO: 23
  Exemplary Antibody Light Chain Sequences

SEQ ID NO: 35 - protein, 239 aa, ARTIFICIAL SEQUENCE; identical to SEQ ID NO: 23
  Exemplary Antibody Light Chain Sequences

SEQ ID NO: 36 - protein, 239 aa, ARTIFICIAL SEQUENCE; identical to SEQ ID NO: 23
  Exemplary Antibody Light Chain Sequences

SEQ ID NO: 37 - protein, 239 aa, ARTIFICIAL SEQUENCE; identical to SEQ ID NO: 23
  Exemplary Antibody Light Chain Sequences

SEQ ID NO: 38 - protein, 239 aa, ARTIFICIAL SEQUENCE; identical to SEQ ID NO: 23
  Exemplary Antibody Light Chain Sequences

SEQ ID NO: 39 - protein, 239 aa, ARTIFICIAL SEQUENCE; identical to SEQ ID NO: 23
  Exemplary Antibody Light Chain Sequences

SEQ ID NO: 40 - protein, 239 aa, ARTIFICIAL SEQUENCE; identical to SEQ ID NO: 23
  Exemplary Antibody Light Chain Sequences

SEQ ID NO: 41 - protein, 239 aa, ARTIFICIAL SEQUENCE; identical to SEQ ID NO: 23
  Exemplary Antibody Light Chain Sequences

SEQ ID NO: 42 - protein, 239 aa, ARTIFICIAL SEQUENCE; identical to SEQ ID NO: 23
  Exemplary Antibody Light Chain Sequences

SEQ ID NO: 43 - protein, 241 aa, ARTIFICIAL SEQUENCE
  Exemplary Antibody Light Chain Sequences
MDMRVPAQLLGLLLLWLRGARCDIVMTQSPLSLPVTPGEPASISCRSSQSLLHSNGHNYLDWYLQKPGQSPQLLIYLGLNRASGVPDRFSGSGSGTDFTLKISRVEAEDVGVYYCMQALQTPLTFGGGTKVEIKRTVAAPSVFIFPPSDEQLKSGTASVVCLLNNFYPREAKVQWKVDNALQSGNSQESVTEQDSKDSTYSLSSTLTLSKADYEKHKVYACEVTHQGLSSPVTKSFNRGEC

SEQ ID NO: 44 - protein, 241 aa, ARTIFICIAL SEQUENCE
  Exemplary Antibody Light Chain Sequences
MDMRVPAQLLGLLLLWLRGARCDIVMTQSPLSLPVTPGEPASISCRSSQSLLHSNGHNYLDWYLQKPGQSPQLLIYLGLNRAHGVPDRFSGSGSGTDFTLKISRVEAEDVGVYYCMQALQTPLTFGGGTKVEIKRTVAAPSVFIFPPSDEQLKSGTASVVCLLNNFYPREAKVQWKVDNALQSGNSQESVTEQDSKDSTYSLSSTLTLSKADYEKHKVYACEVTHQGLSSPVTKSFNRGEC

SEQ ID NO: 45 - protein, 241 aa, ARTIFICIAL SEQUENCE
  Exemplary Antibody Light Chain Sequences
MDMRVPAQLLGLLLLWLRGARCDIVMTQSPLSLPVTPGEPASISCRSSQSLLHSNGHNYLDWYLQKPGQSPQLLIYLGLNRASGVPDRFSGSGHGTDFTLKISRVEAEDVGVYYCMQALQTPLTFGGGTKVEIKRTVAAPSVFIFPPSDEQLKSGTASVVCLLNNFYPREAKVQWKVDNALQSGNSQESVTEQDSKDSTYSLSSTLTLSKADYEKHKVYACEVTHQGLSSPVTKSFNRGEC

SEQ ID NO: 46 - protein, 241 aa, ARTIFICIAL SEQUENCE
  Exemplary Antibody Light Chain Sequences
MDMRVPAQLLGLLLLWLRGARCDIVMTQSPLSLPVTPGEPASISCRSSQSLLHSYGYNYLDWYLQKPGQSPQLLIYLGSNRASGVPDRFSGSGSGTDFTLKISRVEAEDVGVYYCMQALQTPLTFGGGTKVEIKRTVAAPSVFIFPPSDEQLKSGTASVVCLLNNFYPREAKVQWKVDNALQSGNSQESVTEQDSKDSTYSLSSTLTLSKADYEKHKVYACEVTHQGLSSPVTKSFNRGEC

SEQ ID NO: 47 - protein, 241 aa, ARTIFICIAL SEQUENCE
  Exemplary Antibody Light Chain Sequences
MDMRVPAQLLGLLLLWLRGARCDIVMTQSPLSLPVTPGEPASISCRSSQSLLHSFGYNYLDWYLQKPGQSPQLLIYLGSNRASGVPDRFSGSGSGTDFTLKISRVEAEDVGVYYCMQALQTPLTFGGGTKVEIKRTVAAPSVFIFPPSDEQLKSGTASVVCLLNNFYPREAKVQWKVDNALQSGNSQESVTEQDSKDSTYSLSSTLTLSKADYEKHKVYACEVTHQGLSSPVTKSFNRGEC

SEQ ID NO: 48 - protein, 241 aa, ARTIFICIAL SEQUENCE; identical to SEQ ID NO: 10
  Exemplary Antibody Light Chain Sequences

SEQ ID NO: 49 - protein, 241 aa, ARTIFICIAL SEQUENCE
  Exemplary Antibody Light Chain Sequences
MDMRVPAQLLGLLLLWLRGARCDIVMTQSPLSLPVTPGEPASISCRSSQSLLHSFGYNYLDWYLQKPGQSPQLLIYLGLNRASGVPDRFSGSGSGTDFTLKISRVEAEDVGVYYCMQALQTPLTFGGGTKVEIKRTVAAPSVFIFPPSDEQLKSGTASVVCLLNNFYPREAKVQWKVDNALQSGNSQESVTEQDSKDSTYSLSSTLTLSKADYEKHKVYACEVTHQGLSSPVTKSFNRGEC

SEQ ID NO: 50 - protein, 241 aa, ARTIFICIAL SEQUENCE
  Exemplary Antibody Light Chain Sequences
MDMRVPAQLLGLLLLWLRGARCDIVMTQSPLSLPVTPGEPASISCRSSQSLLHSFGYNYLDWYLQKPGQSPQLLIYLGMNRASGVPDRFSGSGSGTDFTLKISRVEAEDVGVYYCMQALQTPLTFGGGTKVEIKRTVAAPSVFIFPPSDEQLKSGTASVVCLLNNFYPREAKVQWKVDNALQSGNSQESVTEQDSKDSTYSLSSTLTLSKADYEKHKVYACEVTHQGLSSPVTKSFNRGEC

SEQ ID NO: 51 - protein, 241 aa, ARTIFICIAL SEQUENCE
  Exemplary Antibody Light Chain Sequences
MDMRVPAQLLGLLLLWLRGARCDIVMTQSPLSLPVTPGEPASISCRSSQSLLHSFGYNYLDWYLQKPGQSPQLLIYLGFNRASGVPDRFSGSGSGTDFTLKISRVEAEDVGVYYCMQALQTPLTFGGGTKVEIKRTVAAPSVFIFPPSDEQLKSGTASVVCLLNNFYPREAKVQWKVDNALQSGNSQESVTEQDSKDSTYSLSSTLTLSKADYEKHKVYACEVTHQGLSSPVTKSFNRGEC

SEQ ID NO: 52 - protein, 241 aa, ARTIFICIAL SEQUENCE
  Exemplary Antibody Light Chain Sequences
MDMRVPAQLLGLLLLWLRGARCDIVMTQSPLSLPVTPGEPASISCRSSQSLLHSFGYNYLDWYLQKPGQSPQLLIYLGHNRASGVPDRFSGSGSGTDFTLKISRVEAEDVGVYYCMQALQTPLTFGGGTKVEIKRTVAAPSVFIFPPSDEQLKSGTASVVCLLNNFYPREAKVQWKVDNALQSGNSQESVTEQDSKDSTYSLSSTLTLSKADYEKHKVYACEVTHQGLSSPVTKSFNRGEC

SEQ ID NO: 53 - protein, 241 aa, ARTIFICIAL SEQUENCE
  Exemplary Antibody Light Chain Sequences
MDMRVPAQLLGLLLLWLRGARCDIVMTQSPLSLPVTPGEPASISCRSSQSLLHSFGYNYLDWYLQKPGQSPQLLIYLGNNRASGVPDRFSGSGSGTDFTLKISRVEAEDVGVYYCMQALQTPLTFGGGTKVEIKRTVAAPSVFIFPPSDEQLKSGTASVVCLLNNFYPREAKVQWKVDNALQSGNSQESVTEQDSKDSTYSLSSTLTLSKADYEKHKVYACEVTHQGLSSPVTKSFNRGEC

SEQ ID NO: 54 - protein, 241 aa, ARTIFICIAL SEQUENCE
  Exemplary Antibody Light Chain Sequences
MDMRVPAQLLGLLLLWLRGARCDIVMTQSPLSLPVTPGEPASISCRSSQSLLHSFGYNYLDWYLQKPGQSPQLLIYLGWNRASGVPDRFSGSGSGTDFTLKISRVEAEDVGVYYCMQALQTPLTFGGGTKVEIKRTVAAPSVFIFPPSDEQLKSGTASVVCLLNNFYPREAKVQWKVDNALQSGNSQESVTEQDSKDSTYSLSSTLTLSKADYEKHKVYACEVTHQGLSSPVTKSFNRGEC

SEQ ID NO: 55 - protein, 241 aa, ARTIFICIAL SEQUENCE
  Exemplary Antibody Light Chain Sequences
MDMRVPAQLLGLLLLWLRGARCDIVMTQSPLSLPVTPGEPASISCRSSQSLLHSFGYNYLDWYLQKPGQSPQLLIYLGQNRASGVPDRFSGSGSGTDFTLKISRVEAEDVGVYYCMQALQTPLTFGGGTKVEIKRTVAAPSVFIFPPSDEQLKSGTASVVCLLNNFYPREAKVQWKVDNALQSGNSQESVTEQDSKDSTYSLSSTLTLSKADYEKHKVYACEVTHQGLSSPVTKSFNRGEC

SEQ ID NO: 56 - protein, 242 aa, ARTIFICIAL SEQUENCE
  Exemplary Antibody Light Chain Sequences
MDMRVPAQLLGLLLLWLRGARCDIVMTQSPLSLPVTPGEPASISCRSSQSLLHSGNGYNYLDWYLQKPGQSPQLLIYLGLNRASGVPDRFSGSGSGTDFTLKISRVEAEDVGVYYCMQAIHTPLTFGGGTKVEIKRTVAAPSVFIFPPSDEQLKSGTASVVCLLNNFYPREAKVQWKVDNALQSGNSQESVTEQDSKDSTYSLSSTLTLSKADYEKHKVYACEVTHQGLSSPVTKSFNRGEC

SEQ ID NO: 57 - protein, 239 aa, ARTIFICIAL SEQUENCE
  Exemplary Antibody Light Chain Sequences
MGSTAILGLLLAVLQGGRADIVMTQSPLSLPVTPGEPASISCRSSQSLLHSGNGYNYLDWYLQKPGQSPQLLIYLGMNRASGVPDRFSGSGSGTDFTLKISRVEAEDVGVYYCMQAIHTPLTFGGGTKVEIKRTVAAPSVFIFPPSDEQLKSGTASVVCLLNNFYPREAKVQWKVDNALQSGNSQESVTEQDSKDSTYSLSSTLTLSKADYEKHKVYACEVTHQGLSSPVTKSFNRGEC

SEQ ID NO: 58 - protein, 239 aa, ARTIFICIAL SEQUENCE
  Exemplary Antibody Light Chain Sequences
MGSTAILGLLLAVLQGGRADIVMTQSPLSLPVTPGEPASISCRSSQSLLHSGNGYNYLDWYLQKPGQSPQLLIYLGFNRASGVPDRFSGSGSGTDFTLKISRVEAEDVGVYYCMQAIHTPLTFGGGTKVEIKRTVAAPSVFIFPPSDEQLKSGTASVVCLLNNFYPREAKVQWKVDNALQSGNSQESVTEQDSKDSTYSLSSTLTLSKADYEKHKVYACEVTHQGLSSPVTKSFNRGEC

SEQ ID NO: 59 - protein, 239 aa, ARTIFICIAL SEQUENCE
  Exemplary Antibody Light Chain Sequences
MGSTAILGLLLAVLQGGRADIVMTQSPLSLPVTPGEPASISCRSSQSLLHSGNGYNYLDWYLQKPGQSPQLLIYLGHNRASGVPDRFSGSGSGTDFTLKISRVEAEDVGVYYCMQAIHTPLTFGGGTKVEIKRTVAAPSVFIFPPSDEQLKSGTASVVCLLNNFYPREAKVQWKVDNALQSGNSQESVTEQDSKDSTYSLSSTLTLSKADYEKHKVYACEVTHQGLSSPVTKSFNRGEC

SEQ ID NO: 60 - protein, 239 aa, ARTIFICIAL SEQUENCE
  Exemplary Antibody Light Chain Sequences
MGSTAILGLLLAVLQGGRADIVMTQSPLSLPVTPGEPASISCRSSQSLLHSGNGYNYLDWYLQKPGQSPQLLIYLGNNRASGVPDRFSGSGSGTDFTLKISRVEAEDVGVYYCMQAIHTPLTFGGGTKVEIKRTVAAPSVFIFPPSDEQLKSGTASVVCLLNNFYPREAKVQWKVDNALQSGNSQESVTEQDSKDSTYSLSSTLTLSKADYEKHKVYACEVTHQGLSSPVTKSFNRGEC

SEQ ID NO: 61 - protein, 239 aa, ARTIFICIAL SEQUENCE
  Exemplary Antibody Light Chain Sequences
MGSTAILGLLLAVLQGGRADIVMTQSPLSLPVTPGEPASISCRSSQSLLHSGNGYNYLDWYLQKPGQSPQLLIYLGWNRASGVPDRFSGSGSGTDFTLKISRVEAEDVGVYYCMQAIHTPLTFGGGTKVEIKRTVAAPSVFIFPPSDEQLKSGTASVVCLLNNFYPREAKVQWKVDNALQSGNSQESVTEQDSKDSTYSLSSTLTLSKADYEKHKVYACEVTHQGLSSPVTKSFNRGEC

SEQ ID NO: 62 - protein, 239 aa, ARTIFICIAL SEQUENCE
  Exemplary Antibody Light Chain Sequences
MGSTAILGLLLAVLQGGRADIVMTQSPLSLPVTPGEPASISCRSSQSLLHSGNGYNYLDWYLQKPGQSPQLLIYLGQNRASGVPDRFSGSGSGTDFTLKISRVEAEDVGVYYCMQAIHTPLTFGGGTKVEIKRTVAAPSVFIFPPSDEQLKSGTASVVCLLNNFYPREAKVQWKVDNALQSGNSQESVTEQDSKDSTYSLSSTLTLSKADYEKHKVYACEVTHQGLSSPVTKSFNRGEC

SEQ ID NO: 63 - protein, 241 aa, ARTIFICIAL SEQUENCE
  Exemplary Antibody Light Chain Sequences
MDMRVPAQLLGLLLLWLRGARCDIVMTQSPLSLPVTPGEPASISCRSSQSLLHSNGYNYLDWYLQKPGQSPQLLIYLGLARASGVPDRFSGSGSGTDFTLKISRVEAEDVGVYYCMQALQTPLTFGGGTKVEIKRTVAAPSVFIFPPSDEQLKSGTASVVCLLNNFYPREAKVQWKVDNALQSGNSQESVTEQDSKDSTYSLSSTLTLSKADYEKHKVYACEVTHQGLSSPVTKSFNRGEC

SEQ ID NO: 64 - protein, 241 aa, ARTIFICIAL SEQUENCE; identical to SEQ ID NO: 63
  Exemplary Antibody Light Chain Sequences

SEQ ID NO: 65 - protein, 242 aa, ARTIFICIAL SEQUENCE; identical to SEQ ID NO: 56
  Exemplary Antibody Light Chain Sequences

SEQ ID NO: 66 - protein, 241 aa, ARTIFICIAL SEQUENCE; identical to SEQ ID NO: 43
  Exemplary Antibody Light Chain Sequences

SEQ ID NO: 67 - protein, 241 aa, ARTIFICIAL SEQUENCE; identical to SEQ ID NO: 44
  Exemplary Antibody Light Chain Sequences

SEQ ID NO: 68 - protein, 242 aa, ARTIFICIAL SEQUENCE; identical to SEQ ID NO: 56
  Exemplary Antibody Light Chain Sequences

SEQ ID NO: 69 - protein, 242 aa, ARTIFICIAL SEQUENCE
  Exemplary Antibody Light Chain Sequences
MDMRVPAQLLGLLLLWLRGARCDIVMTQSPLSLPVTPGEPASISCRSSQSLLHSGNGYNYLDWYLQKPGQSPQLLIYLGLNRASGVPDRFSGSGSGTDFTLKISRVEAEDVGVYYCMQALQTPLTFGGGTKVEIKRTVAAPSVFIFPPSDEQLKSGTASVVCLLNNFYPREAKVQWKVDNALQSGNSQESVTEQDSKDSTYSLSSTLTLSKADYEKHKVYACEVTHQGLSSPVTKSFNRGEC

SEQ ID NO: 70 - protein, 241 aa, ARTIFICIAL SEQUENCE; identical to SEQ ID NO: 44
  Exemplary Antibody Light Chain Sequences

SEQ ID NO: 71 - protein, 241 aa, ARTIFICIAL SEQUENCE; identical to SEQ ID NO: 49
  Exemplary Antibody Light Chain Sequences

SEQ ID NO: 72 - protein, 219 aa, ARTIFICIAL SEQUENCE
  Exemplary Antibody Light Chain Sequences
DIVMTQSPLSLPVTPGEPASISCRSSQSLLHSFGYNYLDWYLQKPGQSPQLLIYLGLNRASGVPDRFSGSGSGTDFTLKISRVEAEDVGVYYCMQALQTPLTFGGGTKVEIKRTVAAPSVFIFPPSDEQLKSGTASVVCLLNNFYPREAKVQWKVDNALQSGNSQESVTEQDSKDSTYSLSSTLTLSKADYEKHKVYACEVTHQGLSSPVTKSFNRGEC

SEQ ID NO: 73 - protein, 241 aa, ARTIFICIAL SEQUENCE
  Exemplary Antibody Light Chain Sequences
MDMRVPAQLLGLLLLWLRGARCDIVMTQSPLSLPVTPGEPASISCRSSQSLLHSFGHNYLDWYLQKPGQSPQLLIYLGLNRAHGVPDRFSGSGSGTDFTLKISRVEAEDVGVYYCMQALQTPLTFGGGTKVEIKRTVAAPSVFIFPPSDEQLKSGTASVVCLLNNFYPREAKVQWKVDNALQSGNSQESVTEQDSKDSTYSLSSTLTLSKADYEKHKVYACEVTHQGLSSPVTKSFNRGEC

SEQ ID NO: 74 - protein, 241 aa, ARTIFICIAL SEQUENCE; identical to SEQ ID NO: 73
  Exemplary Antibody Light Chain Sequences

SEQ ID NO: 75 - protein, 242 aa, ARTIFICIAL SEQUENCE; identical to SEQ ID NO: 56
  Exemplary Antibody Light Chain Sequences

SEQ ID NO: 76 - protein, 241 aa, ARTIFICIAL SEQUENCE; identical to SEQ ID NO: 49
  Exemplary Antibody Light Chain Sequences

SEQ ID NO: 77 - protein, 241 aa, ARTIFICIAL SEQUENCE; identical to SEQ ID NO: 44
  Exemplary Antibody Light Chain Sequences

SEQ ID NO: 78 - protein, 241 aa, ARTIFICIAL SEQUENCE; identical to SEQ ID NO: 44
  Exemplary Antibody Light Chain Sequences

SEQ ID NO: 79 - protein, 241 aa, ARTIFICIAL SEQUENCE; identical to SEQ ID NO: 49
  Exemplary Antibody Light Chain Sequences

SEQ ID NO: 80 - protein, 241 aa, ARTIFICIAL SEQUENCE; identical to SEQ ID NO: 49
  Exemplary Antibody Light Chain Sequences

SEQ ID NO: 81 - protein, 241 aa, ARTIFICIAL SEQUENCE; identical to SEQ ID NO: 73
  Exemplary Antibody Light Chain Sequences

SEQ ID NO: 82 - protein, 241 aa, ARTIFICIAL SEQUENCE
  Exemplary Antibody Light Chain Sequences
MDMRVPAQLLGLLLLWLRGARCDIVMTQSPLSLPVTPGEPASISCRSSQSLLHSYGHNYLDWYLQKPGQSPQLLIYLGLNRAHGVPDRFSGSGSGTDFTLKISRVEAEDVGVYYCMQALQTPLTFGGGTKVEIKRTVAAPSVFIFPPSDEQLKSGTASVVCLLNNFYPREAKVQWKVDNALQSGNSQESVTEQDSKDSTYSLSSTLTLSKADYEKHKVYACEVTHQGLSSPVTKSFNRGEC

SEQ ID NO: 83 - protein, 241 aa, ARTIFICIAL SEQUENCE; identical to SEQ ID NO: 82
  Exemplary Antibody Light Chain Sequences

SEQ ID NO: 84 - protein, 238 aa, ARTIFICIAL SEQUENCE
  Exemplary Antibody Light Chain Sequences
MDMRVPAQLLGLLLLWLRGARCESVLTQPPSVSAAPGQKVTISCSGSSSNIGNNFVSWYQQLPGTAPKLLIYDYNKRPSGIPDRFSGSKSGTSATLGITGLQTGDEADYYCGTWDSSLSAYVFGTGTRVTVLGQPKAAPSVTLFPPSSEELQANKATLVCLISDFYPGAVTVAWKADSSPVKAGVETTTPSKQSNNKYAASSYLSLTPEQWKSHRSYSCQVTHEGSTVEKTVAPTECS

SEQ ID NO: 85 - protein, 233 aa, ARTIFICIAL SEQUENCE
  Exemplary Antibody Light Chain Sequences
MGSTAILGLLLAVLQGGRADIQMTQSPSSLSASVGDRVTITCRASQSISIYLNWYQQKPGKAPYLLIYAAASLQSGVPSRFSGSGSGTDFTLTISSLQPEDFATYYCQQSYSAPITFGQGTRLEIKRTVAAPSVFIFPPSDEQLKSGTASVVCLLNNFYPREAKVQWKVDNALQSGNSQESVTEQDSKDSTYSLSSTLTLSKADYEKHKVYACEVTHQGLSSPVTKSFNRGEC

SEQ ID NO: 86 - protein, 241 aa, ARTIFICIAL SEQUENCE
  Exemplary Antibody Light Chain Sequences
MDMRVPAQLLGLLLLWLRGARCDIVMTQSPLSLPVTPGEPASISCRSSQSLLHSNGYNYLDWYLQKPGQSPQLLIYLGSNRASGVPDRFSGSGSGTDFTLKISRVEAEDVGVYYCMQAMQTPLTFGGGTKVEIKRTVAAPSVFIFPPSDEQLKSGTASVVCLLNNFYPREAKVQWKVDNALQSGNSQESVTEQDSKDSTYSLSSTLTLSKADYEKHKVYACEVTHQGLSSPVTKSFNRGEC

SEQ ID NO: 87 - protein, 241 aa, ARTIFICIAL SEQUENCE; identical to SEQ ID NO: 8
  Exemplary Antibody Light Chain Sequences

SEQ ID NO: 88 - protein, 241 aa, ARTIFICIAL SEQUENCE
  Exemplary Antibody Light Chain Sequences
MDMRVPAQLLGLLLLWLRGARCDIVMTQSPLSLPVTPGEPASISCRSSQSLLHSNMYNYLDWYLQKPGQSPQLLIYLGSNRASGVPDRFSGSGSGTDFTLKISRVEAEDVGVYYCMQALQTPLTFGGGTKVEIKRTVAAPSVFIFPPSDEQLKSGTASVVCLLNNFYPREAKVQWKVDNALQSGNSQESVTEQDSKDSTYSLSSTLTLSKADYEKHKVYACEVTHQGLSSPVTKSFNRGEC

SEQ ID NO: 89 - protein, 241 aa, ARTIFICIAL SEQUENCE
  Exemplary Antibody Light Chain Sequences
MDMRVPAQLLGLLLLWLRGARCDIVMTQSPLSLPVTPGEPASISCRSSQSLLHSNQYNYLDWYLQKPGQSPQLLIYLGSNRASGVPDRFSGSGSGTDFTLKISRVEAEDVGVYYCMQALQTPLTFGGGTKVEIKRTVAAPSVFIFPPSDEQLKSGTASVVCLLNNFYPREAKVQWKVDNALQSGNSQESVTEQDSKDSTYSLSSTLTLSKADYEKHKVYACEVTHQGLSSPVTKSFNRGEC

SEQ ID NO: 90 - protein, 241 aa, ARTIFICIAL SEQUENCE
  Exemplary Antibody Light Chain Sequences
MDMRVPAQLLGLLLLWLRGARCDIVMTQSPLSLPVTPGEPASISCRSSQSLMHSNGYNYLDWYLQKPGQSPQLLIYLGSNRASGVPDRFSGSGSGTDFTLKISRVEAEDVGVYYCMQALQTPLTFGGGTKVEIKRTVAAPSVFIFPPSDEQLKSGTASVVCLLNNFYPREAKVQWKVDNALQSGNSQESVTEQDSKDSTYSLSSTLTLSKADYEKHKVYACEVTHQGLSSPVTKSFNRGEC

SEQ ID NO: 91 - protein, 241 aa, ARTIFICIAL SEQUENCE
  Exemplary Antibody Light Chain Sequences
MDMRVPAQLLGLLLLWLRGARCDIVMTQSPLSLPVTPGEPASISCRSSQSLLHSNGYNYLDWYLQKPGQSPQLLIYLGINRASGVPDRFSGSGSGTDFTLKISRVEAEDVGVYYCMQALQTPLTFGGGTKVEIKRTVAAPSVFIFPPSDEQLKSGTASVVCLLNNFYPREAKVQWKVDNALQSGNSQESVTEQDSKDSTYSLSSTLTLSKADYEKHKVYACEVTHQGLSSPVTKSFNRGEC

SEQ ID NO: 92 - protein, 487 aa, ARTIFICIAL SEQUENCE
  Exemplary Antibody Heavy Chain Sequences
MDMRVPAQLLGLLLLWLRGARCEVQLVESGGGLVQPGGSLRLSCAASGFTFSSYWMSWVRQAPGKGLEWVASIKQDGSEKYYVDSVKGRFTISRDNARNSLYLQMNSLRAEDTAVYYCARDLVLMVYDIDYYYYGMDVWGQGTTVTVSSASTKGPSVFPLAPCSRSTSESTAALGCLVKDYFPEPVTVSWNSGALTSGVHTFPAVLQSSGLYSLSSVVTVPSSNFGTQTYTCNVDHKPSNTKVDKTVERKCCVECPPCPAPPVAGPSVFLFPPKPKDTLMISRTPEVTCVVVDVSHEDPEVQFNWYVDGVEVHNAKTKPREEQFNSTFRVVSVLTVVHQDWLNGKEYKCKVSNKGLPAPIEKTISKTKGQPREPQVYTLPPSREEMTKNQVSLTCLVKGFYPSDIAVEWESNGGCHLPFAVCGGGQPENNYKTTPPMLDSDGSFFLYSKLTVDKSRWQQGNVFSCSVMHEALHNHYTQKSLSLSPGK

SEQ ID NO: 93 - protein, 487 aa, ARTIFICIAL SEQUENCE
  Exemplary Antibody Heavy Chain Sequences
MDMRVPAQLLGLLLLWLRGARCEVQLVESGGGLVQPGGSLRLSCAASGFTFSSYWMSWVRQAPGKGLEWVASIKQDGSEKYYVDSVKGRFTISRDNARNSLYLQMNSLRAEDTAVYYCARDLVLMVYDIDYYYYGMDVWGQGTTVTVSSASTKGPSVFPLAPCSRSTSESTAALGCLVKDYFPEPVTVSWNSGALTSGVHTFPAVLQSSGLYSLSSVVTVPSSNFGTQTYTCNVDHKPSNTKVDKTVERKCCVECPPCPAPPVAGPSVFLFPPKPKDTLMISRTPEVTCVVVDVSHEDPEVQFNWYVDGVEVHNAKTKPREEQFNSTFRVVSVLTVVHQDWLNGKEYKCKVSNKGLPAPIEKTISKTKGQPREPQVYTLPPSREEMTKNQVSLTCLVKGFYPSDIAVEWESNGGCALYPTNCGGGQPENNYKTTPPMLDSDGSFFLYSKLTVDKSRWQQGNVFSCSVMHEALHNHYTQKSLSLSPGK

SEQ ID NO: 94 - protein, 487 aa, ARTIFICIAL SEQUENCE
  Exemplary Antibody Heavy Chain Sequences
MDMRVPAQLLGLLLLWLRGARCEVQLVESGGGLVQPGGSLRLSCAASGFTFSSYWMSWVRQAPGKGLEWVASIKQDGSEKYYVDSVKGRFTISRDNARNSLYLQMNSLRAEDTAVYYCARDLVLMVYDMDYYYYGMDVWGQGTTVTVSSASTKGPSVFPLAPCSRSTSESTAALGCLVKDYFPEPVTVSWNSGALTSGVHTFPAVLQSSGLYSLSSVVTVPSSNFGTQTYTCNVDHKPSNTKVDKTVERKCCVECPPCPAPPVAGPSVFLFPPKPKDTLMISRTPEVTCVVVDVSHEDPEVQFNWYVDGVEVHNAKTKPREEQFNSTFRVVSVLTVVHQDWLNGKEYKCKVSNKGLPAPIEKTISKTKGQPREPQVYTLPPSREEMTKNQVSLTCLVKGFYPSDIAVEWESNGGCHLPFAVCGGGQPENNYKTTPPMLDSDGSFFLYSKLTVDKSRWQQGNVFSCSVMHEALHNHYTQKSLSLSPGK

SEQ ID NO: 95 - protein, 444 aa, ARTIFICIAL SEQUENCE
  Exemplary Antibody Heavy Chain Sequences
QVQLVQSGAEVTKPGASVKVSCKASGYTFTSYGISWVRQAPGQGLEWMGWISVYKGNTNYAQKLQGRVTMTTDTSTSTAYMELRSLRSDDTAVYYCARNYQIFSFDYWGQGTLVTVSSASTKGPSVFPLAPCSRSTSESTAALGCLVKDYFPEPVTVSWNSGALTSGVHTFPAVLQSSGLYSLSSVVTVPSSNFGTQTYTCNVDHKPSNTKVDKTVERKCCVECPPCPAPPVAGPSVFLFPPKPKDTLMISRTPEVTCVVVDVSHEDPEVQFNWYVDGVEVHNAKTKPREEQFNSTFRVVSVLTVVHQDWLNGKEYKCKVSNKGLPAPIEKTISKTKGQPREPQVYTLPPSREEMTKNQVSLTCLVKGFYPSDIAVEWESNGQPENNYKTTPPMLDSDGSFFLYSKLTVDKSRWQQGNVFSCSVMHEALHNHYTQKSLSLSPGK

SEQ ID NO: 96 - protein, 440 aa, ARTIFICIAL SEQUENCE
  Exemplary Antibody Heavy Chain Sequences
QVQLVESGGGVVQPGRSLRLSCAASGFTFSSYGMHWVRQAPGKGLEWVAVIWYDGSNKYYADSVKGRFTISRDNSKNTLYLQMNSLRAEDTAVYYCVRDRGLDWGQGTLVTVSSASTKGPSVFPLAPCSRSTSESTAALGCLVKDYFPEPVTVSWNSGALTSGVHTFPAVLQSSGLYSLSSVVTVPSSNFGTQTYTCNVDHKPSNTKVDKTVERKCCVECPPCPAPPVAGPSVFLFPPKPKDTLMISRTPEVTCVVVDVSHEDPEVQFNWYVDGVEVHNAKTKPREEQFNSTFRVVSVLTVVHQDWLNGKEYKCKVSNKGLPAPIEKTISKTKGQPREPQVYTLPPSREEMTKNQVSLTCLVKGFYPSDIAVEWESNGQPENNYKTTPPMLDSDGSFFLYSKLTVDKSRWQQGNVFSCSVMHEALHNHYTQKSLSLSPGK

SEQ ID NO: 97 - protein, 442 aa, ARTIFICIAL SEQUENCE
  Exemplary Antibody Heavy Chain Sequences
QVQLQQWGAGLLKPSETLSLTCAVSGGSFRAYYWNWIRQPPGKGLEWIGEINHSGRTDYNPSLKSRVTISVDTSKNQFSLKLSSVTAADTAVYYCARGQLVPFDYWGQGTLVTVSSASTKGPSVFPLAPCSRSTSESTAALGCLVKDYFPEPVTVSWNSGALTSGVHTFPAVLQSSGLYSLSSVVTVPSSNFGTQTYTCNVDHKPSNTKVDKTVERKCCVECPPCPAPPVAGPSVFLFPPKPKDTLMISRTPEVTCVVVDVSHEDPEVQFNWYVDGVEVHNAKTKPREEQFNSTFRVVSVLTVVHQDWLNGKEYKCKVSNKGLPAPIEKTISKTKGQPREPQVYTLPPSREEMTKNQVSLTCLVKGFYPSDIAVEWESNGQPENNYKTTPPMLDSDGSFFLYSKLTVDKSRWQQGNVFSCSVMHEALHNHYTQKSLSLSPGK

SEQ ID NO: 98 - protein, 441 aa, ARTIFICIAL SEQUENCE
  Exemplary Antibody Heavy Chain Sequences
QIQLVQSGAEVKKPGASVKVSCKASGYTLTSYGISWVRQAPGQGLEWMGWISFYNGNTNYAQKVQGRVTMTTDTSTSTVYMELRSLRSDDTAVYFCARGYGMDVWGQGTTVTVSSASTKGPSVFPLAPCSRSTSESTAALGCLVKDYFPEPVTVSWNSGALTSGVHTFPAVLQSSGLYSLSSVVTVPSSNFGTQTYTCNVDHKPSNTKVDKTVERKCCVECPPCPAPPVAGPSVFLFPPKPKDTLMISRTPEVTCVVVDVSHEDPEVQFNWYVDGVEVHNAKTKPREEQFNSTFRVVSVLTVVHQDWLNGKEYKCKVSNKGLPAPIEKTISKTKGQPREPQVYTLPPSREEMTKNQVSLTCLVKGFYPSDIAVEWESNGQPENNYKTTPPMLDSDGSFFLYSKLTVDKSRWQQGNVFSCSVMHEALHNHYTQKSLSLSPGK

SEQ ID NO: 99 - protein, 441 aa, ARTIFICIAL SEQUENCE
  Exemplary Antibody Heavy Chain Sequences
QVQLVQSGAEVKKSGASVKVSCKASGYTLTSYGISWVRQAPGQGLEWMGWISVYNGNTNYAQKVQGRVTMTTDTSTSTVYMEVRSLRSDDTAVYYCARGYGMDVWGQGTTVTVSSASTKGPSVFPLAPCSRSTSESTAALGCLVKDYFPEPVTVSWNSGALTSGVHTFPAVLQSSGLYSLSSVVTVPSSNFGTQTYTCNVDHKPSNTKVDKTVERKCCVECPPCPAPPVAGPSVFLFPPKPKDTLMISRTPEVTCVVVDVSHEDPEVQFNWYVDGVEVHNAKTKPREEQFNSTFRVVSVLTVVHQDWLNGKEYKCKVSNKGLPAPIEKTISKTKGQPREPQVYTLPPSREEMTKNQVSLTCLVKGFYPSDIAVEWESNGQPENNYKTTPPMLDSDGSFFLYSKLTVDKSRWQQGNVFSCSVMHEALHNHYTQKSLSLSPGK

SEQ ID NO: 100 - protein, 468 aa, ARTIFICIAL SEQUENCE
  Exemplary Antibody Heavy Chain Sequences
MELGLRWVFLVAILEGVQCEVQLVESGGGLVKPGGSLRLSCAASGFTHSSYSMNWVRQAPGKGLEWVSSISSSSSYISYADSVKGRFTISRDNAKNSLYLQMNSLRAEDTAVYFCARDYDFHSAYYDAFDVWGQGTMVTVSSASTKGPSVFPLAPCSRSTSESTAALGCLVKDYFPEPVTVSWNSGALTSGVHTFPAVLQSSGLYSLSSVVTVPSSNFGTQTYTCNVDHKPSNTKVDKTVERKCCVECPPCPAPPVAGPSVFLFPPKPKDTLMISRTPEVTCVVVDVSHEDPEVQFNWYVDGVEVHNAKTKPREEQFNSTFRVVSVLTVVHQDWLNGKEYKCKVSNKGLPAPIEKTISKTKGQPREPQVYTLPPSREEMTKNQVSLTCLVKGFYPSDIAVEWESNGQPENNYKTTPPMLDSDGSFFLYSKLTVDKSRWQQGNVFSCSVMHEALHNHYTQKSLSLSPGK

SEQ ID NO: 101 - protein, 468 aa, ARTIFICIAL SEQUENCE
  Exemplary Antibody Heavy Chain Sequences
MELGLRWVFLVAILEGVQCEVQLVESGGGLVKPGGSLRLSCAASGFTFSSHSMNWVRQAPGKGLEWVSSISSSSSYISYADSVKGRFTISRDNAKNSLYLQMNSLRAEDTAVYFCARDYDFHSAYYDAFDVWGQGTMVTVSSASTKGPSVFPLAPCSRSTSESTAALGCLVKDYFPEPVTVSWNSGALTSGVHTFPAVLQSSGLYSLSSVVTVPSSNFGTQTYTCNVDHKPSNTKVDKTVERKCCVECPPCPAPPVAGPSVFLFPPKPKDTLMISRTPEVTCVVVDVSHEDPEVQFNWYVDGVEVHNAKTKPREEQFNSTFRVVSVLTVVHQDWLNGKEYKCKVSNKGLPAPIEKTISKTKGQPREPQVYTLPPSREEMTKNQVSLTCLVKGFYPSDIAVEWESNGQPENNYKTTPPMLDSDGSFFLYSKLTVDKSRWQQGNVFSCSVMHEALHNHYTQKSLSLSPGK

SEQ ID NO: 102 - protein, 468 aa, ARTIFICIAL SEQUENCE
  Exemplary Antibody Heavy Chain Sequences
MELGLRWVFLVAILEGVQCEVQLVESGGGLVKPGGSLRLSCAASGFTFSSYSMNWVRQAPGKGLEWVSSISSHSSYISYADSVKGRFTISRDNAKNSLYLQMNSLRAEDTAVYFCARDYDFHSAYYDAFDVWGQGTMVTVSSASTKGPSVFPLAPCSRSTSESTAALGCLVKDYFPEPVTVSWNSGALTSGVHTFPAVLQSSGLYSLSSVVTVPSSNFGTQTYTCNVDHKPSNTKVDKTVERKCCVECPPCPAPPVAGPSVFLFPPKPKDTLMISRTPEVTCVVVDVSHEDPEVQFNWYVDGVEVHNAKTKPREEQFNSTFRVVSVLTVVHQDWLNGKEYKCKVSNKGLPAPIEKTISKTKGQPREPQVYTLPPSREEMTKNQVSLTCLVKGFYPSDIAVEWESNGQPENNYKTTPPMLDSDGSFFLYSKLTVDKSRWQQGNVFSCSVMHEALHNHYTQKSLSLSPGK

SEQ ID NO: 103 - protein, 468 aa, ARTIFICIAL SEQUENCE
  Exemplary Antibody Heavy Chain Sequences
MELGLRWVFLVAILEGVQCEVQLVESGGGLVKPGGSLRLSCAASGFTFSSYSMNWVRQAPGKGLEWVSSISSSSSYISYADSVKGRFTISRDNAKNSLYLQMNSLRAEDTAVYFCARDYDFHSAHYDAFDVWGQGTMVTVSSASTKGPSVFPLAPCSRSTSESTAALGCLVKDYFPEPVTVSWNSGALTSGVHTFPAVLQSSGLYSLSSVVTVPSSNFGTQTYTCNVDHKPSNTKVDKTVERKCCVECPPCPAPPVAGPSVFLFPPKPKDTLMISRTPEVTCVVVDVSHEDPEVQFNWYVDGVEVHNAKTKPREEQFNSTFRVVSVLTVVHQDWLNGKEYKCKVSNKGLPAPIEKTISKTKGQPREPQVYTLPPSREEMTKNQVSLTCLVKGFYPSDIAVEWESNGQPENNYKTTPPMLDSDGSFFLYSKLTVDKSRWQQGNVFSCSVMHEALHNHYTQKSLSLSPGK

SEQ ID NO: 104 - protein, 468 aa, ARTIFICIAL SEQUENCE; identical to SEQ ID NO: 100
  Exemplary Antibody Heavy Chain Sequences

SEQ ID NO: 105 - protein, 468 aa, ARTIFICIAL SEQUENCE; identical to SEQ ID NO: 101
  Exemplary Antibody Heavy Chain Sequences

SEQ ID NO: 106 - protein, 468 aa, ARTIFICIAL SEQUENCE; identical to SEQ ID NO: 103
  Exemplary Antibody Heavy Chain Sequences

SEQ ID NO: 107 - protein, 468 aa, ARTIFICIAL SEQUENCE
  Exemplary Antibody Heavy Chain Sequences
MELGLRWVFLVAILEGVQCEVQLVESGGGLVKPGGSLRLSCAASGFTHSSYSMNWVRQAPGKGLEWVSSISSSSHYISYADSVKGRFTISRDNAKNSLYLQMNSLRAEDTAVYFCARDYDFHSAYYDAFDVWGQGTMVTVSSASTKGPSVFPLAPCSRSTSESTAALGCLVKDYFPEPVTVSWNSGALTSGVHTFPAVLQSSGLYSLSSVVTVPSSNFGTQTYTCNVDHKPSNTKVDKTVERKCCVECPPCPAPPVAGPSVFLFPPKPKDTLMISRTPEVTCVVVDVSHEDPEVQFNWYVDGVEVHNAKTKPREEQFNSTFRVVSVLTVVHQDWLNGKEYKCKVSNKGLPAPIEKTISKTKGQPREPQVYTLPPSREEMTKNQVSLTCLVKGFYPSDIAVEWESNGQPENNYKTTPPMLDSDGSFFLYSKLTVDKSRWQQGNVFSCSVMHEALHNHYTQKSLSLSPGK

SEQ ID NO: 108 - protein, 468 aa, ARTIFICIAL SEQUENCE
  Exemplary Antibody Heavy Chain Sequences
MELGLRWVFLVAILEGVQCEVQLVESGGGLVKPGGSLRLSCAASGFTHSSYSMNWVRQAPGKGLEWVSSISSSSSYISHADSVKGRFTISRDNAKNSLYLQMNSLRAEDTAVYFCARDYDFHSAYYDAFDVWGQGTMVTVSSASTKGPSVFPLAPCSRSTSESTAALGCLVKDYFPEPVTVSWNSGALTSGVHTFPAVLQSSGLYSLSSVVTVPSSNFGTQTYTCNVDHKPSNTKVDKTVERKCCVECPPCPAPPVAGPSVFLFPPKPKDTLMISRTPEVTCVVVDVSHEDPEVQFNWYVDGVEVHNAKTKPREEQFNSTFRVVSVLTVVHQDWLNGKEYKCKVSNKGLPAPIEKTISKTKGQPREPQVYTLPPSREEMTKNQVSLTCLVKGFYPSDIAVEWESNGQPENNYKTTPPMLDSDGSFFLYSKLTVDKSRWQQGNVFSCSVMHEALHNHYTQKSLSLSPGK

SEQ ID NO: 109 - protein, 468 aa, ARTIFICIAL SEQUENCE
  Exemplary Antibody Heavy Chain Sequences
MELGLRWVFLVAILEGVQCEVQLVESGGGLVKPGGSLRLSCAASGFTHSSYSMNWVRQAPGKGLEWVSSISSSSSYISYAHSVKGRFTISRDNAKNSLYLQMNSLRAEDTAVYFCARDYDFHSAYYDAFDVWGQGTMVTVSSASTKGPSVFPLAPCSRSTSESTAALGCLVKDYFPEPVTVSWNSGALTSGVHTFPAVLQSSGLYSLSSVVTVPSSNFGTQTYTCNVDHKPSNTKVDKTVERKCCVECPPCPAPPVAGPSVFLFPPKPKDTLMISRTPEVTCVVVDVSHEDPEVQFNWYVDGVEVHNAKTKPREEQFNSTFRVVSVLTVVHQDWLNGKEYKCKVSNKGLPAPIEKTISKTKGQPREPQVYTLPPSREEMTKNQVSLTCLVKGFYPSDIAVEWESNGQPENNYKTTPPMLDSDGSFFLYSKLTVDKSRWQQGNVFSCSVMHEALHNHYTQKSLSLSPGK

SEQ ID NO: 110 - protein, 468 aa, ARTIFICIAL SEQUENCE
  Exemplary Antibody Heavy Chain Sequences
MELGLRWVFLVAILEGVQCEVQLVESGGGLVKPGGSLRLSCAASGFTHSSYSMNWVRQAPGKGLEWVSSISSSSSYISYADHVKGRFTISRDNAKNSLYLQMNSLRAEDTAVYFCARDYDFHSAYYDAFDVWGQGTMVTVSSASTKGPSVFPLAPCSRSTSESTAALGCLVKDYFPEPVTVSWNSGALTSGVHTFPAVLQSSGLYSLSSVVTVPSSNFGTQTYTCNVDHKPSNTKVDKTVERKCCVECPPCPAPPVAGPSVFLFPPKPKDTLMISRTPEVTCVVVDVSHEDPEVQFNWYVDGVEVHNAKTKPREEQFNSTFRVVSVLTVVHQDWLNGKEYKCKVSNKGLPAPIEKTISKTKGQPREPQVYTLPPSREEMTKNQVSLTCLVKGFYPSDIAVEWESNGQPENNYKTTPPMLDSDGSFFLYSKLTVDKSRWQQGNVFSCSVMHEALHNHYTQKSLSLSPGK

SEQ ID NO: 111 - protein, 468 aa, ARTIFICIAL SEQUENCE
  Exemplary Antibody Heavy Chain Sequences
MELGLRWVFLVAILEGVQCEVQLVESGGGLVKPGGSLRLSCAASGFTHSSYSMNWVRQAPGKGLEWVSSISSSSSYISYADSVKGRFTISRDNAKNSLYLQMNSLRAEDTAVYFCARDYDFHSAHYDAFDVWGQGTMVTVSSASTKGPSVFPLAPCSRSTSESTAALGCLVKDYFPEPVTVSWNSGALTSGVHTFPAVLQSSGLYSLSSVVTVPSSNFGTQTYTCNVDHKPSNTKVDKTVERKCCVECPPCPAPPVAGPSVFLFPPKPKDTLMISRTPEVTCVVVDVSHEDPEVQFNWYVDGVEVHNAKTKPREEQFNSTFRVVSVLTVVHQDWLNGKEYKCKVSNKGLPAPIEKTISKTKGQPREPQVYTLPPSREEMTKNQVSLTCLVKGFYPSDIAVEWESNGQPENNYKTTPPMLDSDGSFFLYSKLTVDKSRWQQGNVFSCSVMHEALHNHYTQKSLSLSPGK

SEQ ID NO: 112 - protein, 468 aa, ARTIFICIAL SEQUENCE
  Exemplary Antibody Heavy Chain Sequences
MELGLRWVFLVAILEGVQCEVQLVESGGGLVKPGGSLRLSCAASGFTFSSHSMNWVRQAPGKGLEWVSSISSHSSYISYADSVKGRFTISRDNAKNSLYLQMNSLRAEDTAVYFCARDYDFHSAYYDAFDVWGQGTMVTVSSASTKGPSVFPLAPCSRSTSESTAALGCLVKDYFPEPVTVSWNSGALTSGVHTFPAVLQSSGLYSLSSVVTVPSSNFGTQTYTCNVDHKPSNTKVDKTVERKCCVECPPCPAPPVAGPSVFLFPPKPKDTLMISRTPEVTCVVVDVSHEDPEVQFNWYVDGVEVHNAKTKPREEQFNSTFRVVSVLTVVHQDWLNGKEYKCKVSNKGLPAPIEKTISKTKGQPREPQVYTLPPSREEMTKNQVSLTCLVKGFYPSDIAVEWESNGQPENNYKTTPPMLDSDGSFFLYSKLTVDKSRWQQGNVFSCSVMHEALHNHYTQKSLSLSPGK

SEQ ID NO: 113 - protein, 468 aa, ARTIFICIAL SEQUENCE
  Exemplary Antibody Heavy Chain Sequences
MELGLRWVFLVAILEGVQCEVQLVESGGGLVKPGGSLRLSCAASGFTFSSHSMNWVRQAPGKGLEWVSSISSSSSYISYAHSVKGRFTISRDNAKNSLYLQMNSLRAEDTAVYFCARDYDFHSAYYDAFDVWGQGTMVTVSSASTKGPSVFPLAPCSRSTSESTAALGCLVKDYFPEPVTVSWNSGALTSGVHTFPAVLQSSGLYSLSSVVTVPSSNFGTQTYTCNVDHKPSNTKVDKTVERKCCVECPPCPAPPVAGPSVFLFPPKPKDTLMISRTPEVTCVVVDVSHEDPEVQFNWYVDGVEVHNAKTKPREEQFNSTFRVVSVLTVVHQDWLNGKEYKCKVSNKGLPAPIEKTISKTKGQPREPQVYTLPPSREEMTKNQVSLTCLVKGFYPSDIAVEWESNGQPENNYKTTPPMLDSDGSFFLYSKLTVDKSRWQQGNVFSCSVMHEALHNHYTQKSLSLSPGK

SEQ ID NO: 114 - protein, 468 aa, ARTIFICIAL SEQUENCE
  Exemplary Antibody Heavy Chain Sequences
MELGLRWVFLVAILEGVQCEVQLVESGGGLVKPGGSLRLSCAASGFTFSSHSMNWVRQAPGKGLEWVSSISSSSSYISYADHVKGRFTISRDNAKNSLYLQMNSLRAEDTAVYFCARDYDFHSAYYDAFDVWGQGTMVTVSSASTKGPSVFPLAPCSRSTSESTAALGCLVKDYFPEPVTVSWNSGALTSGVHTFPAVLQSSGLYSLSSVVTVPSSNFGTQTYTCNVDHKPSNTKVDKTVERKCCVECPPCPAPPVAGPSVFLFPPKPKDTLMISRTPEVTCVVVDVSHEDPEVQFNWYVDGVEVHNAKTKPREEQFNSTFRVVSVLTVVHQDWLNGKEYKCKVSNKGLPAPIEKTISKTKGQPREPQVYTLPPSREEMTKNQVSLTCLVKGFYPSDIAVEWESNGQPENNYKTTPPMLDSDGSFFLYSKLTVDKSRWQQGNVFSCSVMHEALHNHYTQKSLSLSPGK

SEQ ID NO: 115 - protein, 468 aa, ARTIFICIAL SEQUENCE
  Exemplary Antibody Heavy Chain Sequences
MELGLRWVFLVAILEGVQCEVQLVESGGGLVKPGGSLRLSCAASGFTFSSHSMNWVRQAPGKGLEWVSSISSSSSYISYADSVKGRFTISRDNAKNSLYLQMNSLRAEDTAVYFCARDYDFHSAHYDAFDVWGQGTMVTVSSASTKGPSVFPLAPCSRSTSESTAALGCLVKDYFPEPVTVSWNSGALTSGVHTFPAVLQSSGLYSLSSVVTVPSSNFGTQTYTCNVDHKPSNTKVDKTVERKCCVECPPCPAPPVAGPSVFLFPPKPKDTLMISRTPEVTCVVVDVSHEDPEVQFNWYVDGVEVHNAKTKPREEQFNSTFRVVSVLTVVHQDWLNGKEYKCKVSNKGLPAPIEKTISKTKGQPREPQVYTLPPSREEMTKNQVSLTCLVKGFYPSDIAVEWESNGQPENNYKTTPPMLDSDGSFFLYSKLTVDKSRWQQGNVFSCSVMHEALHNHYTQKSLSLSPGK

SEQ ID NO: 116 - protein, 468 aa, ARTIFICIAL SEQUENCE
  Exemplary Antibody Heavy Chain Sequences
MELGLRWVFLVAILEGVQCEVQLVESGGGLVKPGGSLRLSCAASGFTFSSYSMNWVRQAPGKGLEWVSSISSHSSYHSYADSVKGRFTISRDNAKNSLYLQMNSLRAEDTAVYFCARDYDFHSAYYDAFDVWGQGTMVTVSSASTKGPSVFPLAPCSRSTSESTAALGCLVKDYFPEPVTVSWNSGALTSGVHTFPAVLQSSGLYSLSSVVTVPSSNFGTQTYTCNVDHKPSNTKVDKTVERKCCVECPPCPAPPVAGPSVFLFPPKPKDTLMISRTPEVTCVVVDVSHEDPEVQFNWYVDGVEVHNAKTKPREEQFNSTFRVVSVLTVVHQDWLNGKEYKCKVSNKGLPAPIEKTISKTKGQPREPQVYTLPPSREEMTKNQVSLTCLVKGFYPSDIAVEWESNGQPENNYKTTPPMLDSDGSFFLYSKLTVDKSRWQQGNVFSCSVMHEALHNHYTQKSLSLSPGK

SEQ ID NO: 117 - protein, 468 aa, ARTIFICIAL SEQUENCE
  Exemplary Antibody Heavy Chain Sequences
MELGLRWVFLVAILEGVQCEVQLVESGGGLVKPGGSLRLSCAASGFTFSSYSMNWVRQAPGKGLEWVSSISSHSSYISYADSVKGRFTISRDNAKNSLYLQMNSLRAEDTAVYFCARDYDFHSAHYDAFDVWGQGTMVTVSSASTKGPSVFPLAPCSRSTSESTAALGCLVKDYFPEPVTVSWNSGALTSGVHTFPAVLQSSGLYSLSSVVTVPSSNFGTQTYTCNVDHKPSNTKVDKTVERKCCVECPPCPAPPVAGPSVFLFPPKPKDTLMISRTPEVTCVVVDVSHEDPEVQFNWYVDGVEVHNAKTKPREEQFNSTFRVVSVLTVVHQDWLNGKEYKCKVSNKGLPAPIEKTISKTKGQPREPQVYTLPPSREEMTKNQVSLTCLVKGFYPSDIAVEWESNGQPENNYKTTPPMLDSDGSFFLYSKLTVDKSRWQQGNVFSCSVMHEALHNHYTQKSLSLSPGK

SEQ ID NO: 118 - protein, 468 aa, ARTIFICIAL SEQUENCE
  Exemplary Antibody Heavy Chain Sequences
MELGLRWVFLVAILEGVQCEVQLVESGGGLVKPGGSLRLSCAASGFTFSSYSMNWVRQAPGKGLEWVSSISSSSHYHSYADSVKGRFTISRDNAKNSLYLQMNSLRAEDTAVYFCARDYDFHSAYYDAFDVWGQGTMVTVSSASTKGPSVFPLAPCSRSTSESTAALGCLVKDYFPEPVTVSWNSGALTSGVHTFPAVLQSSGLYSLSSVVTVPSSNFGTQTYTCNVDHKPSNTKVDKTVERKCCVECPPCPAPPVAGPSVFLFPPKPKDTLMISRTPEVTCVVVDVSHEDPEVQFNWYVDGVEVHNAKTKPREEQFNSTFRVVSVLTVVHQDWLNGKEYKCKVSNKGLPAPIEKTISKTKGQPREPQVYTLPPSREEMTKNQVSLTCLVKGFYPSDIAVEWESNGQPENNYKTTPPMLDSDGSFFLYSKLTVDKSRWQQGNVFSCSVMHEALHNHYTQKSLSLSPGK

SEQ ID NO: 119 - protein, 468 aa, ARTIFICIAL SEQUENCE
  Exemplary Antibody Heavy Chain Sequences
MELGLRWVFLVAILEGVQCEVQLVESGGGLVKPGGSLRLSCAASGFTFSSYSMNWVRQAPGKGLEWVSSISSSSHYISHADSVKGRFTISRDNAKNSLYLQMNSLRAEDTAVYFCARDYDFHSAYYDAFDVWGQGTMVTVSSASTKGPSVFPLAPCSRSTSESTAALGCLVKDYFPEPVTVSWNSGALTSGVHTFPAVLQSSGLYSLSSVVTVPSSNFGTQTYTCNVDHKPSNTKVDKTVERKCCVECPPCPAPPVAGPSVFLFPPKPKDTLMISRTPEVTCVVVDVSHEDPEVQFNWYVDGVEVHNAKTKPREEQFNSTFRVVSVLTVVHQDWLNGKEYKCKVSNKGLPAPIEKTISKTKGQPREPQVYTLPPSREEMTKNQVSLTCLVKGFYPSDIAVEWESNGQPENNYKTTPPMLDSDGSFFLYSKLTVDKSRWQQGNVFSCSVMHEALHNHYTQKSLSLSPGK

SEQ ID NO: 120 - protein, 468 aa, ARTIFICIAL SEQUENCE
  Exemplary Antibody Heavy Chain Sequences
MELGLRWVFLVAILEGVQCEVQLVESGGGLVKPGGSLRLSCAASGFTFSSYSMNWVRQAPGKGLEWVSSISSSSHYISYADHVKGRFTISRDNAKNSLYLQMNSLRAEDTAVYFCARDYDFHSAYYDAFDVWGQGTMVTVSSASTKGPSVFPLAPCSRSTSESTAALGCLVKDYFPEPVTVSWNSGALTSGVHTFPAVLQSSGLYSLSSVVTVPSSNFGTQTYTCNVDHKPSNTKVDKTVERKCCVECPPCPAPPVAGPSVFLFPPKPKDTLMISRTPEVTCVVVDVSHEDPEVQFNWYVDGVEVHNAKTKPREEQFNSTFRVVSVLTVVHQDWLNGKEYKCKVSNKGLPAPIEKTISKTKGQPREPQVYTLPPSREEMTKNQVSLTCLVKGFYPSDIAVEWESNGQPENNYKTTPPMLDSDGSFFLYSKLTVDKSRWQQGNVFSCSVMHEALHNHYTQKSLSLSPGK

SEQ ID NO: 121 - protein, 468 aa, ARTIFICIAL SEQUENCE
  Exemplary Antibody Heavy Chain Sequences
MELGLRWVFLVAILEGVQCEVQLVESGGGLVKPGGSLRLSCAASGFTFSSYSMNWVRQAPGKGLEWVSSISSSSSYHSYADSVKGRFTISRDNAKNSLYLQMNSLRAEDTAVYFCARDYDFHSAHYDAFDVWGQGTMVTVSSASTKGPSVFPLAPCSRSTSESTAALGCLVKDYFPEPVTVSWNSGALTSGVHTFPAVLQSSGLYSLSSVVTVPSSNFGTQTYTCNVDHKPSNTKVDKTVERKCCVECPPCPAPPVAGPSVFLFPPKPKDTLMISRTPEVTCVVVDVSHEDPEVQFNWYVDGVEVHNAKTKPREEQFNSTFRVVSVLTVVHQDWLNGKEYKCKVSNKGLPAPIEKTISKTKGQPREPQVYTLPPSREEMTKNQVSLTCLVKGFYPSDIAVEWESNGQPENNYKTTPPMLDSDGSFFLYSKLTVDKSRWQQGNVFSCSVMHEALHNHYTQKSLSLSPGK

SEQ ID NO: 122 - protein, 468 aa, ARTIFICIAL SEQUENCE
  Exemplary Antibody Heavy Chain Sequences
MELGLRWVFLVAILEGVQCEVQLVESGGGLVKPGGSLRLSCAASGFTFSSYSMNWVRQAPGKGLEWVSSISSSSSYHSYADSVKGRFTISRDNAKNSLYLQMNSLRAEDTAVYFCARDYDFHSAYHDAFDVWGQGTMVTVSSASTKGPSVFPLAPCSRSTSESTAALGCLVKDYFPEPVTVSWNSGALTSGVHTFPAVLQSSGLYSLSSVVTVPSSNFGTQTYTCNVDHKPSNTKVDKTVERKCCVECPPCPAPPVAGPSVFLFPPKPKDTLMISRTPEVTCVVVDVSHEDPEVQFNWYVDGVEVHNAKTKPREEQFNSTFRVVSVLTVVHQDWLNGKEYKCKVSNKGLPAPIEKTISKTKGQPREPQVYTLPPSREEMTKNQVSLTCLVKGFYPSDIAVEWESNGQPENNYKTTPPMLDSDGSFFLYSKLTVDKSRWQQGNVFSCSVMHEALHNHYTQKSLSLSPGK

SEQ ID NO: 123 - protein, 468 aa, ARTIFICIAL SEQUENCE
  Exemplary Antibody Heavy Chain Sequences
MELGLRWVFLVAILEGVQCEVQLVESGGGLVKPGGSLRLSCAASGFTFSSYSMNWVRQAPGKGLEWVSSISSSSSYISHADSVKGRFTISRDNAKNSLYLQMNSLRAEDTAVYFCARDYDFHSAHYDAFDVWGQGTMVTVSSASTKGPSVFPLAPCSRSTSESTAALGCLVKDYFPEPVTVSWNSGALTSGVHTFPAVLQSSGLYSLSSVVTVPSSNFGTQTYTCNVDHKPSNTKVDKTVERKCCVECPPCPAPPVAGPSVFLFPPKPKDTLMISRTPEVTCVVVDVSHEDPEVQFNWYVDGVEVHNAKTKPREEQFNSTFRVVSVLTVVHQDWLNGKEYKCKVSNKGLPAPIEKTISKTKGQPREPQVYTLPPSREEMTKNQVSLTCLVKGFYPSDIAVEWESNGQPENNYKTTPPMLDSDGSFFLYSKLTVDKSRWQQGNVFSCSVMHEALHNHYTQKSLSLSPGK

SEQ ID NO: 124 - protein, 468 aa, ARTIFICIAL SEQUENCE
  Exemplary Antibody Heavy Chain Sequences
MELGLRWVFLVAILEGVQCEVQLVESGGGLVKPGGSLRLSCAASGFTFSSYSMNWVRQAPGKGLEWVSSISSSSSYISYAHSVKGRFTISRDNAKNSLYLQMNSLRAEDTAVYFCARDYDFHSAHYDAFDVWGQGTMVTVSSASTKGPSVFPLAPCSRSTSESTAALGCLVKDYFPEPVTVSWNSGALTSGVHTFPAVLQSSGLYSLSSVVTVPSSNFGTQTYTCNVDHKPSNTKVDKTVERKCCVECPPCPAPPVAGPSVFLFPPKPKDTLMISRTPEVTCVVVDVSHEDPEVQFNWYVDGVEVHNAKTKPREEQFNSTFRVVSVLTVVHQDWLNGKEYKCKVSNKGLPAPIEKTISKTKGQPREPQVYTLPPSREEMTKNQVSLTCLVKGFYPSDIAVEWESNGQPENNYKTTPPMLDSDGSFFLYSKLTVDKSRWQQGNVFSCSVMHEALHNHYTQKSLSLSPGK

SEQ ID NO: 125 - protein, 468 aa, ARTIFICIAL SEQUENCE
  Exemplary Antibody Heavy Chain Sequences
MELGLRWVFLVAILEGVQCEVQLVESGGGLVKPGGSLRLSCAASGFTFSSYSMNWVRQAPGKGLEWVSSISSSSSYISYAHSVKGRFTISRDNAKNSLYLQMNSLRAEDTAVYFCARDYDFHSAYHDAFDVWGQGTMVTVSSASTKGPSVFPLAPCSRSTSESTAALGCLVKDYFPEPVTVSWNSGALTSGVHTFPAVLQSSGLYSLSSVVTVPSSNFGTQTYTCNVDHKPSNTKVDKTVERKCCVECPPCPAPPVAGPSVFLFPPKPKDTLMISRTPEVTCVVVDVSHEDPEVQFNWYVDGVEVHNAKTKPREEQFNSTFRVVSVLTVVHQDWLNGKEYKCKVSNKGLPAPIEKTISKTKGQPREPQVYTLPPSREEMTKNQVSLTCLVKGFYPSDIAVEWESNGQPENNYKTTPPMLDSDGSFFLYSKLTVDKSRWQQGNVFSCSVMHEALHNHYTQKSLSLSPGK

SEQ ID NO: 126 - protein, 468 aa, ARTIFICIAL SEQUENCE
  Exemplary Antibody Heavy Chain Sequences
MELGLRWVFLVAILEGVQCEVQLVESGGGLVKPGGSLRLSCAASGFTFSSYSMNWVRQAPGKGLEWVSSISSSSSYISYADHVKGRFTISRDNAKNSLYLQMNSLRAEDTAVYFCARDYDFHSAHYDAFDVWGQGTMVTVSSASTKGPSVFPLAPCSRSTSESTAALGCLVKDYFPEPVTVSWNSGALTSGVHTFPAVLQSSGLYSLSSVVTVPSSNFGTQTYTCNVDHKPSNTKVDKTVERKCCVECPPCPAPPVAGPSVFLFPPKPKDTLMISRTPEVTCVVVDVSHEDPEVQFNWYVDGVEVHNAKTKPREEQFNSTFRVVSVLTVVHQDWLNGKEYKCKVSNKGLPAPIEKTISKTKGQPREPQVYTLPPSREEMTKNQVSLTCLVKGFYPSDIAVEWESNGQPENNYKTTPPMLDSDGSFFLYSKLTVDKSRWQQGNVFSCSVMHEALHNHYTQKSLSLSPGK

SEQ ID NO: 127 - protein, 475 aa, ARTIFICIAL SEQUENCE
  Exemplary Antibody Heavy Chain Sequences
MDMRVPAQLLGLLLLWLRGARCEVQLVESGGGLVQPGGSLRLSCAASGFTFSSYWMSWVRQAPGKGLEWVASIKQDGSEKYYVDSVKGRFTISRDNARNSLYLQMNSLRAEDTAVYYCARDLVLMVYDIDYYYYGMDVWGQGTTVTVSSASTKGPSVFPLAPCSRSTSESTAALGCLVKDYFPEPVTVSWNSGALTSGVHTFPAVLQSSGLYSLSSVVTVPSSNFGTQTYTCNVDHKPSNTKVDKTVERKCCVECPPCPAPPVAGPSVFLFPPKPKDTLMISRTPEVTCVVVDVSHEDPEVQFNWYVDGVEVHNAKTKPREEQFNSTFRVVSVLTVVHQDWLNGKEYKCKVSNKGLPAPIEKTISKTKGQPREPQVYTLPPSREEMTKNQVSLTCLVKGFYPSDIAVEWESNGQPENNYKTTPPMLDSDGSFFLYSKLTVDKSRWQQGNVFSCSVMHEALHNHYTQKSLSLSPGK

SEQ ID NO: 128 - protein, 475 aa, ARTIFICIAL SEQUENCE; identical to SEQ ID NO: 127
  Exemplary Antibody Heavy Chain Sequences

SEQ ID NO: 129 - protein, 475 aa, ARTIFICIAL SEQUENCE; identical to SEQ ID NO: 127
  Exemplary Antibody Heavy Chain Sequences

SEQ ID NO: 130 - protein, 475 aa, ARTIFICIAL SEQUENCE
  Exemplary Antibody Heavy Chain Sequences
MDMRVPAQLLGLLLLWLRGARCEVQLVESGGGLVQPGGSLRLSCAASGFTFSSYWMSWVRQAPGKGLEWVASIKQDGSEKYYVDSVKGRFTISRDNARNSLYLQMNSLRAEDTAVYYCARDLVLMVYDMDYYYYGMDVWGQGTTVTVSSASTKGPSVFPLAPCSRSTSESTAALGCLVKDYFPEPVTVSWNSGALTSGVHTFPAVLQSSGLYSLSSVVTVPSSNFGTQTYTCNVDHKPSNTKVDKTVERKCCVECPPCPAPPVAGPSVFLFPPKPKDTLMISRTPEVTCVVVDVSHEDPEVQFNWYVDGVEVHNAKTKPREEQFNSTFRVVSVLTVVHQDWLNGKEYKCKVSNKGLPAPIEKTISKTKGQPREPQVYTLPPSREEMTKNQVSLTCLVKGFYPSDIAVEWESNGQPENNYKTTPPMLDSDGSFFLYSKLTVDKSRWQQGNVFSCSVMHEALHNHYTQKSLSLSPGK

SEQ ID NO: 131 - protein, 475 aa, ARTIFICIAL SEQUENCE; identical to SEQ ID NO: 130
  Exemplary Antibody Heavy Chain Sequences

SEQ ID NO: 132 - protein, 475 aa, ARTIFICIAL SEQUENCE; identical to SEQ ID NO: 130
  Exemplary Antibody Heavy Chain Sequences

SEQ ID NO: 133 - protein, 475 aa, ARTIFICIAL SEQUENCE; identical to SEQ ID NO: 130
  Exemplary Antibody Heavy Chain Sequences

SEQ ID NO: 134 - protein, 472 aa, ARTIFICIAL SEQUENCE
  Exemplary Antibody Heavy Chain Sequences
MGSTAILGLLLAVLQGGRAEVQLVESGGGLVQPGGSLRLSCAASGFTFSSYWMSWVRQAPGKGLEWVASIKQDGSEKYYVDSVKGRFTISRDNARNSLYLQMNSLRAEDTAVYYCARDLVLFVYDMDYYYYGMDVWGQGTTVTVSSASTKGPSVFPLAPCSRSTSESTAALGCLVKDYFPEPVTVSWNSGALTSGVHTFPAVLQSSGLYSLSSVVTVPSSNFGTQTYTCNVDHKPSNTKVDKTVERKCCVECPPCPAPPVAGPSVFLFPPKPKDTLMISRTPEVTCVVVDVSHEDPEVQFNWYVDGVEVHNAKTKPREEQFNSTFRVVSVLTVVHQDWLNGKEYKCKVSNKGLPAPIEKTISKTKGQPREPQVYTLPPSREEMTKNQVSLTCLVKGFYPSDIAVEWESNGQPENNYKTTPPMLDSDGSFFLYSKLTVDKSRWQQGNVFSCSVMHEALHNHYTQKSLSLSPGK

SEQ ID NO: 135 - protein, 472 aa, ARTIFICIAL SEQUENCE; identical to SEQ ID NO: 134
  Exemplary Antibody Heavy Chain Sequences

SEQ ID NO: 136 - protein, 472 aa, ARTIFICIAL SEQUENCE; identical to SEQ ID NO: 134
  Exemplary Antibody Heavy Chain Sequences

SEQ ID NO: 137 - protein, 472 aa, ARTIFICIAL SEQUENCE; identical to SEQ ID NO: 134
  Exemplary Antibody Heavy Chain Sequences

SEQ ID NO: 138 - protein, 472 aa, ARTIFICIAL SEQUENCE; identical to SEQ ID NO: 134
  Exemplary Antibody Heavy Chain Sequences

SEQ ID NO: 139 - protein, 472 aa, ARTIFICIAL SEQUENCE; identical to SEQ ID NO: 134
  Exemplary Antibody Heavy Chain Sequences

SEQ ID NO: 140 - protein, 472 aa, ARTIFICIAL SEQUENCE
  Exemplary Antibody Heavy Chain Sequences
MGSTAILGLLLAVLQGGRAEVQLVESGGGLVQPGGSLRLSCAASGFTFSSYWMSWVRQAPGKGLEWVASIKQDGSEKYYVDSVKGRFTISRDNARNSLYLQMNSLRAEDTAVYYCARDLVLSVYDMDYYYYGMDVWGQGTTVTVSSASTKGPSVFPLAPCSRSTSESTAALGCLVKDYFPEPVTVSWNSGALTSGVHTFPAVLQSSGLYSLSSVVTVPSSNFGTQTYTCNVDHKPSNTKVDKTVERKCCVECPPCPAPPVAGPSVFLFPPKPKDTLMISRTPEVTCVVVDVSHEDPEVQFNWYVDGVEVHNAKTKPREEQFNSTFRVVSVLTVVHQDWLNGKEYKCKVSNKGLPAPIEKTISKTKGQPREPQVYTLPPSREEMTKNQVSLTCLVKGFYPSDIAVEWESNGQPENNYKTTPPMLDSDGSFFLYSKLTVDKSRWQQGNVFSCSVMHEALHNHYTQKSLSLSPGK

SEQ ID NO: 141 - protein, 472 aa, ARTIFICIAL SEQUENCE; identical to SEQ ID NO: 140
  Exemplary Antibody Heavy Chain Sequences

SEQ ID NO: 142 - protein, 472 aa, ARTIFICIAL SEQUENCE; identical to SEQ ID NO: 140
  Exemplary Antibody Heavy Chain Sequences

SEQ ID NO: 143 - protein, 472 aa, ARTIFICIAL SEQUENCE; identical to SEQ ID NO: 140
  Exemplary Antibody Heavy Chain Sequences

SEQ ID NO: 144 - protein, 472 aa, ARTIFICIAL SEQUENCE; identical to SEQ ID NO: 140
  Exemplary Antibody Heavy Chain Sequences

SEQ ID NO: 145 - protein, 472 aa, ARTIFICIAL SEQUENCE; identical to SEQ ID NO: 140
  Exemplary Antibody Heavy Chain Sequences

SEQ ID NO: 146 - protein, 472 aa, ARTIFICIAL SEQUENCE; identical to SEQ ID NO: 140
  Exemplary Antibody Heavy Chain Sequences

SEQ ID NO: 147 - protein, 472 aa, ARTIFICIAL SEQUENCE; identical to SEQ ID NO: 140
  Exemplary Antibody Heavy Chain Sequences

SEQ ID NO: 148 - protein, 472 aa, ARTIFICIAL SEQUENCE; identical to SEQ ID NO: 134
  Exemplary Antibody Heavy Chain Sequences

SEQ ID NO: 149 - protein, 475 aa, ARTIFICIAL SEQUENCE; identical to SEQ ID NO: 127
  Exemplary Antibody Heavy Chain Sequences

SEQ ID NO: 150 - protein, 477 aa, ARTIFICIAL SEQUENCE
  Exemplary Antibody Heavy Chain Sequences
TTMDMRVPAQLLGLLLLWLRGARCEVQLVESGGGLVQPGGSLRLSCAASGFTFSSYWMSWVRQAPGKGLEWVASIKQDGSEKYYVDSVKGRFTISRDNARNSLYLQMNSLRAEDTAVYYCARDLVLMVYDMDYYYYGMDVWGQGTTVTVSSASTKGPSVFPLAPCSRSTSESTAALGCLVKDYFPEPVTVSWNSGALTSGVHTFPAVLQSSGLYSLSSVVTVPSSNFGTQTYTCNVDHKPSNTKVDKTVERKCCVECPPCPAPPVAGPSVFLFPPKPKDTLMISRTPEVTCVVVDVSHEDPEVQFNWYVDGVEVHNAKTKPREEQFNSTFRVVSVLTVVHQDWLNGKEYKCKVSNKGLPAPIEKTISKTKGQPREPQVYTLPPSREEMTKNQVSLTCLVKGFYPSDIAVEWESNGQPENNYKTTPPMLDSDGSFFLYSKLTVDKSRWQQGNVFSCSVMHEALHNHYTQKSLSLSPGK

SEQ ID NO: 151 - protein, 475 aa, ARTIFICIAL SEQUENCE; identical to SEQ ID NO: 130
  Exemplary Antibody Heavy Chain Sequences

SEQ ID NO: 152 - protein, 475 aa, ARTIFICIAL SEQUENCE; identical to SEQ ID NO: 130
  Exemplary Antibody Heavy Chain Sequences

SEQ ID NO: 153 - protein, 477 aa, ARTIFICIAL SEQUENCE; identical to SEQ ID NO: 150
  Exemplary Antibody Heavy Chain Sequences

SEQ ID NO: 154 - protein, 472 aa, ARTIFICIAL SEQUENCE; identical to SEQ ID NO: 140
  Exemplary Antibody Heavy Chain Sequences

SEQ ID NO: 155 - protein, 472 aa, ARTIFICIAL SEQUENCE; identical to SEQ ID NO: 134
  Exemplary Antibody Heavy Chain Sequences

SEQ ID NO: 156 - protein, 475 aa, ARTIFICIAL SEQUENCE; identical to SEQ ID NO: 130
  Exemplary Antibody Heavy Chain Sequences

SEQ ID NO: 157 - protein, 472 aa, ARTIFICIAL SEQUENCE; identical to SEQ ID NO: 134
  Exemplary Antibody Heavy Chain Sequences

SEQ ID NO: 158 - protein, 475 aa, ARTIFICIAL SEQUENCE; identical to SEQ ID NO: 130
  Exemplary Antibody Heavy Chain Sequences

SEQ ID NO: 159 - protein, 472 aa, ARTIFICIAL SEQUENCE; identical to SEQ ID NO: 140
  Exemplary Antibody Heavy Chain Sequences

SEQ ID NO: 160 - protein, 472 aa, ARTIFICIAL SEQUENCE; identical to SEQ ID NO: 140
  Exemplary Antibody Heavy Chain Sequences

SEQ ID NO: 161 - protein, 472 aa, ARTIFICIAL SEQUENCE; identical to SEQ ID NO: 134
  Exemplary Antibody Heavy Chain Sequences

SEQ ID NO: 162 - protein, 472 aa, ARTIFICIAL SEQUENCE
  Exemplary Antibody Heavy Chain Sequences
MGSTAILGLLLAVLQGGRAEVQLVESGGGLVQPGGSLRLSCAASGFTFSSYWMSWVRQAPGKGLEWVASIKQDGSEKYYVDSVKGRFTISRDNARNSLYLQMNSLRAEDTAVYYCARDLVLNVYDMDYYYYGMDVWGQGTTVTVSSASTKGPSVFPLAPCSRSTSESTAALGCLVKDYFPEPVTVSWNSGALTSGVHTFPAVLQSSGLYSLSSVVTVPSSNFGTQTYTCNVDHKPSNTKVDKTVERKCCVECPPCPAPPVAGPSVFLFPPKPKDTLMISRTPEVTCVVVDVSHEDPEVQFNWYVDGVEVHNAKTKPREEQFNSTFRVVSVLTVVHQDWLNGKEYKCKVSNKGLPAPIEKTISKTKGQPREPQVYTLPPSREEMTKNQVSLTCLVKGFYPSDIAVEWESNGQPENNYKTTPPMLDSDGSFFLYSKLTVDKSRWQQGNVFSCSVMHEALHNHYTQKSLSLSPGK

SEQ ID NO: 163 - protein, 475 aa, ARTIFICIAL SEQUENCE; identical to SEQ ID NO: 127
  Exemplary Antibody Heavy Chain Sequences

SEQ ID NO: 164 - protein, 472 aa, ARTIFICIAL SEQUENCE; identical to SEQ ID NO: 162
  Exemplary Antibody Heavy Chain Sequences

SEQ ID NO: 165 - protein, 475 aa, ARTIFICIAL SEQUENCE; identical to SEQ ID NO: 127
  Exemplary Antibody Heavy Chain Sequences

SEQ ID NO: 166 - protein, 472 aa, ARTIFICIAL SEQUENCE; identical to SEQ ID NO: 140
  Exemplary Antibody Heavy Chain Sequences

SEQ ID NO: 167 - protein, 472 aa, ARTIFICIAL SEQUENCE; identical to SEQ ID NO: 162
  Exemplary Antibody Heavy Chain Sequences

SEQ ID NO: 168 - protein, 467 aa, ARTIFICIAL SEQUENCE
  Exemplary Antibody Heavy Chain Sequences
MEFGLSWVFLVALLRGVQCEVHLVESGGGVVQPGRSLRLSCAASGFTFNSFGMHWVRQAPGKGLEWVALIWSDGSDEYYADSVKGRFTISRDNSKNTLYLQMNSLRAEDTAVYYCARAIAALYYYYGMDVWGQGTTVTVSSASTKGPSVFPLAPCSRSTSESTAALGCLVKDYFPEPVTVSWNSGALTSGVHTFPAVLQSSGLYSLSSVVTVPSSNFGTQTYTCNVDHKPSNTKVDKTVERKCCVECPPCPAPPVAGPSVFLFPPKPKDTLMISRTPEVTCVVVDVSHEDPEVQFNWYVDGVEVHNAKTKPREEQFNSTFRVVSVLTVVHQDWLNGKEYKCKVSNKGLPAPIEKTISKTKGQPREPQVYTLPPSREEMTKNQVSLTCLVKGFYPSDIAVEWESNGQPENNYKTTPPMLDSDGSFFLYSKLTVDKSRWQQGNVFSCSVMHEALHNHYTQKSLSLSPGK

SEQ ID NO: 169 - protein, 466 aa, ARTIFICIAL SEQUENCE
  Exemplary Antibody Heavy Chain Sequences
MGSTAILGLLLAVLQGGRAEVQLLESGGGLVQPGGSLRLSCAASGFTFSSYAMNWVRQAPGKGLEWVSTISGSGGNTYYADSVKGRFTISRDNSKNTLYLQMNSLRAEDTAVYYCAKKFVLMVYAMLDYWGQGTLVTVSSASTKGPSVFPLAPCSRSTSESTAALGCLVKDYFPEPVTVSWNSGALTSGVHTFPAVLQSSGLYSLSSVVTVPSSNFGTQTYTCNVDHKPSNTKVDKTVERKCCVECPPCPAPPVAGPSVFLFPPKPKDTLMISRTPEVTCVVVDVSHEDPEVQFNWYVDGVEVHNAKTKPREEQFNSTFRVVSVLTVVHQDWLNGKEYKCKVSNKGLPAPIEKTISKTKGQPREPQVYTLPPSREEMTKNQVSLTCLVKGFYPSDIAVEWESNGQPENNYKTTPPMLDSDGSFFLYSKLTVDKSRWQQGNVFSCSVMHEALHNHYTQKSLSLSPGK

SEQ ID NO: 170 - protein, 475 aa, ARTIFICIAL SEQUENCE; identical to SEQ ID NO: 127
  Exemplary Antibody Heavy Chain Sequences

SEQ ID NO: 171 - protein, 475 aa, ARTIFICIAL SEQUENCE
  Exemplary Antibody Heavy Chain Sequences
MDMRVPAQLLGLLLLWLRGARCEVQLVESGGGLVQPGGSLRLSCAASGFTFSSYWMSWVRQAPGKGLEWVASIKQDGSEKYYVDSVKGRFTISRDNARNSLYLQMNSLRAEDTAVYYCARDLVLMVYDLDYYYYGMDVWGQGTTVTVSSASTKGPSVFPLAPCSRSTSESTAALGCLVKDYFPEPVTVSWNSGALTSGVHTFPAVLQSSGLYSLSSVVTVPSSNFGTQTYTCNVDHKPSNTKVDKTVERKCCVECPPCPAPPVAGPSVFLFPPKPKDTLMISRTPEVTCVVVDVSHEDPEVQFNWYVDGVEVHNAKTKPREEQFNSTFRVVSVLTVVHQDWLNGKEYKCKVSNKGLPAPIEKTISKTKGQPREPQVYTLPPSREEMTKNQVSLTCLVKGFYPSDIAVEWESNGQPENNYKTTPPMLDSDGSFFLYSKLTVDKSRWQQGNVFSCSVMHEALHNHYTQKSLSLSPGK

SEQ ID NO: 172 - protein, 475 aa, ARTIFICIAL SEQUENCE; identical to SEQ ID NO: 130
  Exemplary Antibody Heavy Chain Sequences

SEQ ID NO: 173 - protein, 475 aa, ARTIFICIAL SEQUENCE; identical to SEQ ID NO: 130
  Exemplary Antibody Heavy Chain Sequences

SEQ ID NO: 174 - protein, 475 aa, ARTIFICIAL SEQUENCE; identical to SEQ ID NO: 130
  Exemplary Antibody Heavy Chain Sequences

SEQ ID NO: 175 - protein, 475 aa, ARTIFICIAL SEQUENCE; identical to SEQ ID NO: 130
  Exemplary Antibody Heavy Chain Sequences

SEQ ID NO: 176-185 - skipped (10 entries)

SEQ ID NO: 186 - protein, 113 aa, ARTIFICIAL SEQUENCE
  Exemplary Antibody Variable Light (VL) Chains
DIVMTQSPLSLPVTPGEPASISCRSSQSLLHSNGYNYLDWYLQKPGQSPQLLIYLGSNRASGVPDRFSGSGSGTDFTLKISRVEAEDVGVYYCMQALQTPLTFGGGTKVEIKR

SEQ ID NO: 187 - protein, 113 aa, ARTIFICIAL SEQUENCE; identical to SEQ ID NO: 186
  Exemplary Antibody Variable Light (VL) Chains

SEQ ID NO: 188 - protein, 113 aa, ARTIFICIAL SEQUENCE
  Exemplary Antibody Variable Light (VL) Chains
DIVMTQSPLSLPVTPGEPASISCRSSQSLLHSNGYNYLDWYLQKPGQSPQLLIYLGLNRASGVPDRFSGSGSGTDFTLKISRVEAEDVGVYYCMQALQTPLTFGGGTKVEIKR

SEQ ID NO: 189 - protein, 112 aa, ARTIFICIAL SEQUENCE
  Exemplary Antibody Variable Light (VL) Chains
QSVLTQPPSVSGAPGQRVTISCTGSRSNIGAGYDVNWYQQLPGTAPKLLIYGNSNRPSGVPDRFSGSKSGTSASLVITGLQAEDEADYYCQSYDSNLSGSVFGGGTKLTVLG

SEQ ID NO: 190 - protein, 114 aa, ARTIFICIAL SEQUENCE
  Exemplary Antibody Variable Light (VL) Chains
DIVLTQSPDFLAVSLGERATINCKSSQNVLYSSSNKNYLVWYQHKPGQPPKLLIYWASTRESGVPDRFSGSGSGTDFTLTISSLQAEDVAVYYCHQYYSTPWTFGQGTKVEIKR

SEQ ID NO: 191 - protein, 111 aa, ARTIFICIAL SEQUENCE
  Exemplary Antibody Variable Light (VL) Chains
QSVLTQPPSASGTPGQRVTISCSGSNSNIGSNTVNWYQQVPGTAPKLLIYSNNQRPSGVPDRFSGSKSGTSASLAISGLQSEDEADYYCAAWDDSLNGWVFGGGTKLTVLG

SEQ ID NO: 192 - protein, 110 aa, ARTIFICIAL SEQUENCE
  Exemplary Antibody Variable Light (VL) Chains
QSALTQPASVSGSPGQSITISCTGTSSDVGGYNSVSWYQQHPGKPPKLMIYEVSNRPSGISNRFSGSKSGNTASLTISGLQAEDEADYFCSSYTSTSMVFGGGTKLAVLR

SEQ ID NO: 193 - protein, 110 aa, ARTIFICIAL SEQUENCE
  Exemplary Antibody Variable Light (VL) Chains
QSALTQPASVSGSPGQSITISCTGTSSDVGGYNSVSWYQQHPGKPPKLMIYEVSNRPSGVSNRFSGSKSANTASLTISGLQADDEADYFCSSYTSTSMVFGGGTKLTVLR

SEQ ID NO: 194 - protein, 112 aa, ARTIFICIAL SEQUENCE
  Exemplary Antibody Variable Light (VL) Chains
ESVLTQPPSVSGAPGQRVTISCTGSSSNIGAGHDVHWYQQLPGTAPKLLISGNSNRPSGVPDRFSGSKSGTSASLAITGLQAEDEADYYCQSYDSSLSGSVFGGGTKLTVLG

SEQ ID NO: 195 - protein, 112 aa, ARTIFICIAL SEQUENCE; identical to SEQ ID NO: 194
  Exemplary Antibody Variable Light (VL) Chains

SEQ ID NO: 196 - protein, 112 aa, ARTIFICIAL SEQUENCE; identical to SEQ ID NO: 194
  Exemplary Antibody Variable Light (VL) Chains

SEQ ID NO: 197 - protein, 112 aa, ARTIFICIAL SEQUENCE; identical to SEQ ID NO: 194
  Exemplary Antibody Variable Light (VL) Chains

SEQ ID NO: 198 - protein, 112 aa, ARTIFICIAL SEQUENCE
  Exemplary Antibody Variable Light (VL) Chains
ESVLTQPPSVSGAPGQRVTISCTGSSSNIGAGYDVHWYQQLPGTAPKLLISGNSNRPSGVPDRFSGSKSGTSASLAITGLQAEDEADYYCQSYDSSLHGSVFGGGTKLTVLG

SEQ ID NO: 199 - protein, 112 aa, ARTIFICIAL SEQUENCE; identical to SEQ ID NO: 198
  Exemplary Antibody Variable Light (VL) Chains

SEQ ID NO: 200 - protein, 112 aa, ARTIFICIAL SEQUENCE; identical to SEQ ID NO: 198
  Exemplary Antibody Variable Light (VL) Chains

SEQ ID NO: 201 - protein, 112 aa, ARTIFICIAL SEQUENCE
  Exemplary Antibody Variable Light (VL) Chains
ESVLTQPPSVSGAPGQRVTISCTGSSSNIGAGYDVHWYQQLPGTAPKLLISGNSNRPSGVPDRFSGSKSGTSASLAITGLQAEDEADYYCQSYDSSLSGSVFGGGTKLTVLG

SEQ ID NO: 202 - protein, 112 aa, ARTIFICIAL SEQUENCE; identical to SEQ ID NO: 201
  Exemplary Antibody Variable Light (VL) Chains

SEQ ID NO: 203 - protein, 112 aa, ARTIFICIAL SEQUENCE; identical to SEQ ID NO: 201
  Exemplary Antibody Variable Light (VL) Chains

SEQ ID NO: 204 - protein, 112 aa, ARTIFICIAL SEQUENCE; identical to SEQ ID NO: 201
  Exemplary Antibody Variable Light (VL) Chains

SEQ ID NO: 205 - protein, 112 aa, ARTIFICIAL SEQUENCE; identical to SEQ ID NO: 201
  Exemplary Antibody Variable Light (VL) Chains

SEQ ID NO: 206 - protein, 112 aa, ARTIFICIAL SEQUENCE; identical to SEQ ID NO: 201
  Exemplary Antibody Variable Light (VL) Chains

SEQ ID NO: 207 - protein, 112 aa, ARTIFICIAL SEQUENCE; identical to SEQ ID NO: 201
  Exemplary Antibody Variable Light (VL) Chains

SEQ ID NO: 208 - protein, 112 aa, ARTIFICIAL SEQUENCE; identical to SEQ ID NO: 201
  Exemplary Antibody Variable Light (VL) Chains

SEQ ID NO: 209 - protein, 112 aa, ARTIFICIAL SEQUENCE; identical to SEQ ID NO: 201
  Exemplary Antibody Variable Light (VL) Chains

SEQ ID NO: 210 - protein, 112 aa, ARTIFICIAL SEQUENCE; identical to SEQ ID NO: 201
  Exemplary Antibody Variable Light (VL) Chains

SEQ ID NO: 211 - protein, 112 aa, ARTIFICIAL SEQUENCE; identical to SEQ ID NO: 201
  Exemplary Antibody Variable Light (VL) Chains

SEQ ID NO: 212 - protein, 112 aa, ARTIFICIAL SEQUENCE; identical to SEQ ID NO: 201
  Exemplary Antibody Variable Light (VL) Chains

SEQ ID NO: 213 - protein, 112 aa, ARTIFICIAL SEQUENCE; identical to SEQ ID NO: 201
  Exemplary Antibody Variable Light (VL) Chains

SEQ ID NO: 214 - protein, 112 aa, ARTIFICIAL SEQUENCE; identical to SEQ ID NO: 201
  Exemplary Antibody Variable Light (VL) Chains

SEQ ID NO: 215 - protein, 112 aa, ARTIFICIAL SEQUENCE; identical to SEQ ID NO: 201
  Exemplary Antibody Variable Light (VL) Chains

SEQ ID NO: 216 - protein, 112 aa, ARTIFICIAL SEQUENCE; identical to SEQ ID NO: 201
  Exemplary Antibody Variable Light (VL) Chains

SEQ ID NO: 217 - protein, 112 aa, ARTIFICIAL SEQUENCE; identical to SEQ ID NO: 201
  Exemplary Antibody Variable Light (VL) Chains

SEQ ID NO: 218 - protein, 112 aa, ARTIFICIAL SEQUENCE; identical to SEQ ID NO: 201
  Exemplary Antibody Variable Light (VL) Chains

SEQ ID NO: 219 - protein, 112 aa, ARTIFICIAL SEQUENCE; identical to SEQ ID NO: 201
  Exemplary Antibody Variable Light (VL) Chains

SEQ ID NO: 220 - protein, 112 aa, ARTIFICIAL SEQUENCE; identical to SEQ ID NO: 201
  Exemplary Antibody Variable Light (VL) Chains

SEQ ID NO: 221 - protein, 113 aa, ARTIFICIAL SEQUENCE
  Exemplary Antibody Variable Light (VL) Chains
DIVMTQSPLSLPVTPGEPASISCRSSQSLLHSNGHNYLDWYLQKPGQSPQLLIYLGLNRASGVPDRFSGSGSGTDFTLKISRVEAEDVGVYYCMQALQTPLTFGGGTKVEIKR

SEQ ID NO: 222 - protein, 113 aa, ARTIFICIAL SEQUENCE
  Exemplary Antibody Variable Light (VL) Chains
DIVMTQSPLSLPVTPGEPASISCRSSQSLLHSNGHNYLDWYLQKPGQSPQLLIYLGLNRAHGVPDRFSGSGSGTDFTLKISRVEAEDVGVYYCMQALQTPLTFGGGTKVEIKR

SEQ ID NO: 223 - protein, 113 aa, ARTIFICIAL SEQUENCE
  Exemplary Antibody Variable Light (VL) Chains
DIVMTQSPLSLPVTPGEPASISCRSSQSLLHSNGHNYLDWYLQKPGQSPQLLIYLGLNRASGVPDRFSGSGHGTDFTLKISRVEAEDVGVYYCMQALQTPLTFGGGTKVEIKR

SEQ ID NO: 224 - protein, 113 aa, ARTIFICIAL SEQUENCE
  Exemplary Antibody Variable Light (VL) Chains
DIVMTQSPLSLPVTPGEPASISCRSSQSLLHSYGYNYLDWYLQKPGQSPQLLIYLGSNRASGVPDRFSGSGSGTDFTLKISRVEAEDVGVYYCMQALQTPLTFGGGTKVEIKR

SEQ ID NO: 225 - protein, 113 aa, ARTIFICIAL SEQUENCE
  Exemplary Antibody Variable Light (VL) Chains
DIVMTQSPLSLPVTPGEPASISCRSSQSLLHSFGYNYLDWYLQKPGQSPQLLIYLGSNRASGVPDRFSGSGSGTDFTLKISRVEAEDVGVYYCMQALQTPLTFGGGTKVEIKR

SEQ ID NO: 226 - protein, 113 aa, ARTIFICIAL SEQUENCE; identical to SEQ ID NO: 188
  Exemplary Antibody Variable Light (VL) Chains

SEQ ID NO: 227 - protein, 113 aa, ARTIFICIAL SEQUENCE
  Exemplary Antibody Variable Light (VL) Chains
DIVMTQSPLSLPVTPGEPASISCRSSQSLLHSFGYNYLDWYLQKPGQSPQLLIYLGLNRASGVPDRFSGSGSGTDFTLKISRVEAEDVGVYYCMQALQTPLTFGGGTKVEIKR

SEQ ID NO: 228 - protein, 113 aa, ARTIFICIAL SEQUENCE
  Exemplary Antibody Variable Light (VL) Chains
DIVMTQSPLSLPVTPGEPASISCRSSQSLLHSFGYNYLDWYLQKPGQSPQLLIYLGMNRASGVPDRFSGSGSGTDFTLKISRVEAEDVGVYYCMQALQTPLTFGGGTKVEIKR

SEQ ID NO: 229 - protein, 113 aa, ARTIFICIAL SEQUENCE
  Exemplary Antibody Variable Light (VL) Chains
DIVMTQSPLSLPVTPGEPASISCRSSQSLLHSFGYNYLDWYLQKPGQSPQLLIYLGFNRASGVPDRFSGSGSGTDFTLKISRVEAEDVGVYYCMQALQTPLTFGGGTKVEIKR

SEQ ID NO: 230 - protein, 113 aa, ARTIFICIAL SEQUENCE
  Exemplary Antibody Variable Light (VL) Chains
DIVMTQSPLSLPVTPGEPASISCRSSQSLLHSFGYNYLDWYLQKPGQSPQLLIYLGHNRASGVPDRFSGSGSGTDFTLKISRVEAEDVGVYYCMQALQTPLTFGGGTKVEIKR

SEQ ID NO: 231 - protein, 113 aa, ARTIFICIAL SEQUENCE
  Exemplary Antibody Variable Light (VL) Chains
DIVMTQSPLSLPVTPGEPASISCRSSQSLLHSFGYNYLDWYLQKPGQSPQLLIYLGNNRASGVPDRFSGSGSGTDFTLKISRVEAEDVGVYYCMQALQTPLTFGGGTKVEIKR

SEQ ID NO: 232 - protein, 113 aa, ARTIFICIAL SEQUENCE
  Exemplary Antibody Variable Light (VL) Chains
DIVMTQSPLSLPVTPGEPASISCRSSQSLLHSFGYNYLDWYLQKPGQSPQLLIYLGWNRASGVPDRFSGSGSGTDFTLKISRVEAEDVGVYYCMQALQTPLTFGGGTKVEIKR

SEQ ID NO: 233 - protein, 113 aa, ARTIFICIAL SEQUENCE
  Exemplary Antibody Variable Light (VL) Chains
DIVMTQSPLSLPVTPGEPASISCRSSQSLLHSFGYNYLDWYLQKPGQSPQLLIYLGQNRASGVPDRFSGSGSGTDFTLKISRVEAEDVGVYYCMQALQTPLTFGGGTKVEIKR

SEQ ID NO: 234 - protein, 114 aa, ARTIFICIAL SEQUENCE
  Exemplary Antibody Variable Light (VL) Chains
DIVMTQSPLSLPVTPGEPASISCRSSQSLLHSGNGYNYLDWYLQKPGQSPQLLIYLGLNRASGVPDRFSGSGSGTDFTLKISRVEAEDVGVYYCMQAIHTPLTFGGGTKVEIKR

SEQ ID NO: 235 - protein, 114 aa, ARTIFICIAL SEQUENCE
  Exemplary Antibody Variable Light (VL) Chains
DIVMTQSPLSLPVTPGEPASISCRSSQSLLHSGNGYNYLDWYLQKPGQSPQLLIYLGMNRASGVPDRFSGSGSGTDFTLKISRVEAEDVGVYYCMQAIHTPLTFGGGTKVEIKR

SEQ ID NO: 236 - protein, 114 aa, ARTIFICIAL SEQUENCE
  Exemplary Antibody Variable Light (VL) Chains
DIVMTQSPLSLPVTPGEPASISCRSSQSLLHSGNGYNYLDWYLQKPGQSPQLLIYLGFNRASGVPDRFSGSGSGTDFTLKISRVEAEDVGVYYCMQAIHTPLTFGGGTKVEIKR

SEQ ID NO: 237 - protein, 114 aa, ARTIFICIAL SEQUENCE
  Exemplary Antibody Variable Light (VL) Chains
DIVMTQSPLSLPVTPGEPASISCRSSQSLLHSGNGYNYLDWYLQKPGQSPQLLIYLGHNRASGVPDRFSGSGSGTDFTLKISRVEAEDVGVYYCMQAIHTPLTFGGGTKVEIKR

SEQ ID NO: 238 - protein, 114 aa, ARTIFICIAL SEQUENCE
  Exemplary Antibody Variable Light (VL) Chains
DIVMTQSPLSLPVTPGEPASISCRSSQSLLHSGNGYNYLDWYLQKPGQSPQLLIYLGNNRASGVPDRFSGSGSGTDFTLKISRVEAEDVGVYYCMQAIHTPLTFGGGTKVEIKR

SEQ ID NO: 239 - protein, 114 aa, ARTIFICIAL SEQUENCE
  Exemplary Antibody Variable Light (VL) Chains
DIVMTQSPLSLPVTPGEPASISCRSSQSLLHSGNGYNYLDWYLQKPGQSPQLLIYLGWNRASGVPDRFSGSGSGTDFTLKISRVEAEDVGVYYCMQAIHTPLTFGGGTKVEIKR

SEQ ID NO: 240 - protein, 114 aa, ARTIFICIAL SEQUENCE
  Exemplary Antibody Variable Light (VL) Chains
DIVMTQSPLSLPVTPGEPASISCRSSQSLLHSGNGYNYLDWYLQKPGQSPQLLIYLGQNRASGVPDRFSGSGSGTDFTLKISRVEAEDVGVYYCMQAIHTPLTFGGGTKVEIKR

SEQ ID NO: 241 - protein, 113 aa, ARTIFICIAL SEQUENCE
  Exemplary Antibody Variable Light (VL) Chains
DIVMTQSPLSLPVTPGEPASISCRSSQSLLHSNGYNYLDWYLQKPGQSPQLLIYLGLARASGVPDRFSGSGSGTDFTLKISRVEAEDVGVYYCMQALQTPLTFGGGTKVEIKR

SEQ ID NO: 242 - protein, 113 aa, ARTIFICIAL SEQUENCE; identical to SEQ ID NO: 241
  Exemplary Antibody Variable Light (VL) Chains

SEQ ID NO: 243 - protein, 114 aa, ARTIFICIAL SEQUENCE; identical to SEQ ID NO: 234
  Exemplary Antibody Variable Light (VL) Chains

SEQ ID NO: 244 - protein, 113 aa, ARTIFICIAL SEQUENCE; identical to SEQ ID NO: 221
  Exemplary Antibody Variable Light (VL) Chains

SEQ ID NO: 245 - protein, 113 aa, ARTIFICIAL SEQUENCE; identical to SEQ ID NO: 222
  Exemplary Antibody Variable Light (VL) Chains

SEQ ID NO: 246 - protein, 114 aa, ARTIFICIAL SEQUENCE; identical to SEQ ID NO: 234
  Exemplary Antibody Variable Light (VL) Chains

SEQ ID NO: 247 - protein, 114 aa, ARTIFICIAL SEQUENCE
  Exemplary Antibody Variable Light (VL) Chains
DIVMTQSPLSLPVTPGEPASISCRSSQSLLHSGNGYNYLDWYLQKPGQSPQLLIYLGLNRASGVPDRFSGSGSGTDFTLKISRVEAEDVGVYYCMQALQTPLTFGGGTKVEIKR

SEQ ID NO: 248 - protein, 113 aa, ARTIFICIAL SEQUENCE; identical to SEQ ID NO: 222
  Exemplary Antibody Variable Light (VL) Chains

SEQ ID NO: 249 - protein, 113 aa, ARTIFICIAL SEQUENCE; identical to SEQ ID NO: 227
  Exemplary Antibody Variable Light (VL) Chains

SEQ ID NO: 250 - protein, 113 aa, ARTIFICIAL SEQUENCE; identical to SEQ ID NO: 227
  Exemplary Antibody Variable Light (VL) Chains

SEQ ID NO: 251 - protein, 113 aa, ARTIFICIAL SEQUENCE
  Exemplary Antibody Variable Light (VL) Chains
DIVMTQSPLSLPVTPGEPASISCRSSQSLLHSFGHNYLDWYLQKPGQSPQLLIYLGLNRAHGVPDRFSGSGSGTDFTLKISRVEAEDVGVYYCMQALQTPLTFGGGTKVEIKR

SEQ ID NO: 252 - protein, 113 aa, ARTIFICIAL SEQUENCE; identical to SEQ ID NO: 251
  Exemplary Antibody Variable Light (VL) Chains

SEQ ID NO: 253 - protein, 114 aa, ARTIFICIAL SEQUENCE; identical to SEQ ID NO: 234
  Exemplary Antibody Variable Light (VL) Chains

SEQ ID NO: 254 - protein, 113 aa, ARTIFICIAL SEQUENCE; identical to SEQ ID NO: 227
  Exemplary Antibody Variable Light (VL) Chains

SEQ ID NO: 255 - protein, 113 aa, ARTIFICIAL SEQUENCE; identical to SEQ ID NO: 222
  Exemplary Antibody Variable Light (VL) Chains

SEQ ID NO: 256 - protein, 113 aa, ARTIFICIAL SEQUENCE; identical to SEQ ID NO: 222
  Exemplary Antibody Variable Light (VL) Chains

SEQ ID NO: 257 - protein, 113 aa, ARTIFICIAL SEQUENCE; identical to SEQ ID NO: 227
  Exemplary Antibody Variable Light (VL) Chains

SEQ ID NO: 258 - protein, 113 aa, ARTIFICIAL SEQUENCE; identical to SEQ ID NO: 227
  Exemplary Antibody Variable Light (VL) Chains

SEQ ID NO: 259 - protein, 113 aa, ARTIFICIAL SEQUENCE; identical to SEQ ID NO: 251
  Exemplary Antibody Variable Light (VL) Chains

SEQ ID NO: 260 - protein, 113 aa, ARTIFICIAL SEQUENCE
  Exemplary Antibody Variable Light (VL) Chains
DIVMTQSPLSLPVTPGEPASISCRSSQSLLHSYGHNYLDWYLQKPGQSPQLLIYLGLNRAHGVPDRFSGSGSGTDFTLKISRVEAEDVGVYYCMQALQTPLTFGGGTKVEIKR

SEQ ID NO: 261 - protein, 113 aa, ARTIFICIAL SEQUENCE; identical to SEQ ID NO: 260
  Exemplary Antibody Variable Light (VL) Chains

SEQ ID NO: 262 - protein, 111 aa, ARTIFICIAL SEQUENCE
  Exemplary Antibody Variable Light (VL) Chains
ESVLTQPPSVSAAPGQKVTISCSGSSSNIGNNFVSWYQQLPGTAPKLLIYDYNKRPSGIPDRFSGSKSGTSATLGITGLQTGDEADYYCGTWDSSLSAYVFGTGTRVTVLG

SEQ ID NO: 263 - protein, 108 aa, ARTIFICIAL SEQUENCE
  Exemplary Antibody Variable Light (VL) Chains
DIQMTQSPSSLSASVGDRVTITCRASQSISIYLNWYQQKPGKAPYLLIYAAASLQSGVPSRFSGSGSGTDFTLTISSLQPEDFATYYCQQSYSAPITFGQGTRLEIKR

SEQ ID NO: 264 - protein, 113 aa, ARTIFICIAL SEQUENCE
  Exemplary Antibody Variable Light (VL) Chains
DIVMTQSPLSLPVTPGEPASISCRSSQSLLHSNGYNYLDWYLQKPGQSPQLLIYLGSNRASGVPDRFSGSGSGTDFTLKISRVEAEDVGVYYCMQAMQTPLTFGGGTKVEIKR

SEQ ID NO: 265 - protein, 113 aa, ARTIFICIAL SEQUENCE; identical to SEQ ID NO: 186
  Exemplary Antibody Variable Light (VL) Chains

SEQ ID NO: 266 - protein, 113 aa, ARTIFICIAL SEQUENCE
  Exemplary Antibody Variable Light (VL) Chains
DIVMTQSPLSLPVTPGEPASISCRSSQSLLHSNMYNYLDWYLQKPGQSPQLLIYLGSNRASGVPDRFSGSGSGTDFTLKISRVEAEDVGVYYCMQALQTPLTFGGGTKVEIKR

SEQ ID NO: 267 - protein, 113 aa, ARTIFICIAL SEQUENCE
  Exemplary Antibody Variable Light (VL) Chains
DIVMTQSPLSLPVTPGEPASISCRSSQSLLHSNQYNYLDWYLQKPGQSPQLLIYLGSNRASGVPDRFSGSGSGTDFTLKISRVEAEDVGVYYCMQALQTPLTFGGGTKVEIKR

SEQ ID NO: 268 - protein, 113 aa, ARTIFICIAL SEQUENCE
  Exemplary Antibody Variable Light (VL) Chains
DIVMTQSPLSLPVTPGEPASISCRSSQSLMHSNGYNYLDWYLQKPGQSPQLLIYLGSNRASGVPDRFSGSGSGTDFTLKISRVEAEDVGVYYCMQALQTPLTFGGGTKVEIKR

SEQ ID NO: 269 - protein, 113 aa, ARTIFICIAL SEQUENCE
  Exemplary Antibody Variable Light (VL) Chains
DIVMTQSPLSLPVTPGEPASISCRSSQSLLHSNGYNYLDWYLQKPGQSPQLLIYLGINRASGVPDRFSGSGSGTDFTLKISRVEAEDVGVYYCMQALQTPLTFGGGTKVEIKR

SEQ ID NO: 270 - protein, 127 aa, ARTIFICIAL SEQUENCE
  Exemplary Antibody Variable Heavy (VH) Chains
EVQLVESGGGLVQPGGSLRLSCAASGFTFSSYWMSWVRQAPGKGLEWVASIKQDGSEKYYVDSVKGRFTISRDNARNSLYLQMNSLRAEDTAVYYCARDLVLMVYDIDYYYYGMDVWGQGTTVTVSS

SEQ ID NO: 271 - protein, 127 aa, ARTIFICIAL SEQUENCE; identical to SEQ ID NO: 270
  Exemplary Antibody Variable Heavy (VH) Chains

SEQ ID NO: 272 - protein, 127 aa, ARTIFICIAL SEQUENCE
  Exemplary Antibody Variable Heavy (VH) Chains
EVQLVESGGGLVQPGGSLRLSCAASGFTFSSYWMSWVRQAPGKGLEWVASIKQDGSEKYYVDSVKGRFTISRDNARNSLYLQMNSLRAEDTAVYYCARDLVLMVYDMDYYYYGMDVWGQGTTVTVSS

SEQ ID NO: 273 - protein, 118 aa, ARTIFICIAL SEQUENCE
  Exemplary Antibody Variable Heavy (VH) Chains
QVQLVQSGAEVTKPGASVKVSCKASGYTFTSYGISWVRQAPGQGLEWMGWISVYKGNTNYAQKLQGRVTMTTDTSTSTAYMELRSLRSDDTAVYYCARNYQIFSFDYWGQGTLVTVSS

SEQ ID NO: 274 - protein, 114 aa, ARTIFICIAL SEQUENCE
  Exemplary Antibody Variable Heavy (VH) Chains
QVQLVESGGGVVQPGRSLRLSCAASGFTFSSYGMHWVRQAPGKGLEWVAVIWYDGSNKYYADSVKGRFTISRDNSKNTLYLQMNSLRAEDTAVYYCVRDRGLDWGQGTLVTVSS

SEQ ID NO: 275 - protein, 116 aa, ARTIFICIAL SEQUENCE
  Exemplary Antibody Variable Heavy (VH) Chains
QVQLQQWGAGLLKPSETLSLTCAVSGGSFRAYYWNWIRQPPGKGLEWIGEINHSGRTDYNPSLKSRVTISVDTSKNQFSLKLSSVTAADTAVYYCARGQLVPFDYWGQGTLVTVSS

SEQ ID NO: 276 - protein, 115 aa, ARTIFICIAL SEQUENCE
  Exemplary Antibody Variable Heavy (VH) Chains
QIQLVQSGAEVKKPGASVKVSCKASGYTLTSYGISWVRQAPGQGLEWMGWISFYNGNTNYAQKVQGRVTMTTDTSTSTVYMELRSLRSDDTAVYFCARGYGMDVWGQGTTVTVSS

SEQ ID NO: 277 - protein, 115 aa, ARTIFICIAL SEQUENCE
  Exemplary Antibody Variable Heavy (VH) Chains
QVQLVQSGAEVKKSGASVKVSCKASGYTLTSYGISWVRQAPGQGLEWMGWISVYNGNTNYAQKVQGRVTMTTDTSTSTVYMEVRSLRSDDTAVYYCARGYGMDVWGQGTTVTVSS

SEQ ID NO: 278 - protein, 123 aa, ARTIFICIAL SEQUENCE
  Exemplary Antibody Variable Heavy (VH) Chains
EVQLVESGGGLVKPGGSLRLSCAASGFTHSSYSMNWVRQAPGKGLEWVSSISSSSSYISYADSVKGRFTISRDNAKNSLYLQMNSLRAEDTAVYFCARDYDFHSAYYDAFDVWGQGTMVTVSS

SEQ ID NO: 279 - protein, 123 aa, ARTIFICIAL SEQUENCE
  Exemplary Antibody Variable Heavy (VH) Chains
EVQLVESGGGLVKPGGSLRLSCAASGFTFSSHSMNWVRQAPGKGLEWVSSISSSSSYISYADSVKGRFTISRDNAKNSLYLQMNSLRAEDTAVYFCARDYDFHSAYYDAFDVWGQGTMVTVSS

SEQ ID NO: 280 - protein, 123 aa, ARTIFICIAL SEQUENCE
  Exemplary Antibody Variable Heavy (VH) Chains
EVQLVESGGGLVKPGGSLRLSCAASGFTFSSYSMNWVRQAPGKGLEWVSSISSHSSYISYADSVKGRFTISRDNAKNSLYLQMNSLRAEDTAVYFCARDYDFHSAYYDAFDVWGQGTMVTVSS

SEQ ID NO: 281 - protein, 123 aa, ARTIFICIAL SEQUENCE
  Exemplary Antibody Variable Heavy (VH) Chains
EVQLVESGGGLVKPGGSLRLSCAASGFTFSSYSMNWVRQAPGKGLEWVSSISSSSSYISYADSVKGRFTISRDNAKNSLYLQMNSLRAEDTAVYFCARDYDFHSAHYDAFDVWGQGTMVTVSS

SEQ ID NO: 282 - protein, 123 aa, ARTIFICIAL SEQUENCE; identical to SEQ ID NO: 278
  Exemplary Antibody Variable Heavy (VH) Chains

SEQ ID NO: 283 - protein, 123 aa, ARTIFICIAL SEQUENCE; identical to SEQ ID NO: 279
  Exemplary Antibody Variable Heavy (VH) Chains

SEQ ID NO: 284 - protein, 123 aa, ARTIFICIAL SEQUENCE; identical to SEQ ID NO: 281
  Exemplary Antibody Variable Heavy (VH) Chains

SEQ ID NO: 285 - protein, 123 aa, ARTIFICIAL SEQUENCE
  Exemplary Antibody Variable Heavy (VH) Chains
EVQLVESGGGLVKPGGSLRLSCAASGFTHSSYSMNWVRQAPGKGLEWVSSISSSSHYISYADSVKGRFTISRDNAKNSLYLQMNSLRAEDTAVYFCARDYDFHSAYYDAFDVWGQGTMVTVSS

SEQ ID NO: 286 - protein, 123 aa, ARTIFICIAL SEQUENCE
  Exemplary Antibody Variable Heavy (VH) Chains
EVQLVESGGGLVKPGGSLRLSCAASGFTHSSYSMNWVRQAPGKGLEWVSSISSSSSYISHADSVKGRFTISRDNAKNSLYLQMNSLRAEDTAVYFCARDYDFHSAYYDAFDVWGQGTMVTVSS

SEQ ID NO: 287 - protein, 123 aa, ARTIFICIAL SEQUENCE
  Exemplary Antibody Variable Heavy (VH) Chains
EVQLVESGGGLVKPGGSLRLSCAASGFTHSSYSMNWVRQAPGKGLEWVSSISSSSSYISYAHSVKGRFTISRDNAKNSLYLQMNSLRAEDTAVYFCARDYDFHSAYYDAFDVWGQGTMVTVSS

SEQ ID NO: 288 - protein, 123 aa, ARTIFICIAL SEQUENCE
  Exemplary Antibody Variable Heavy (VH) Chains
EVQLVESGGGLVKPGGSLRLSCAASGFTHSSYSMNWVRQAPGKGLEWVSSISSSSSYISYADHVKGRFTISRDNAKNSLYLQMNSLRAEDTAVYFCARDYDFHSAYYDAFDVWGQGTMVTVSS

SEQ ID NO: 289 - protein, 123 aa, ARTIFICIAL SEQUENCE
  Exemplary Antibody Variable Heavy (VH) Chains
EVQLVESGGGLVKPGGSLRLSCAASGFTHSSYSMNWVRQAPGKGLEWVSSISSSSSYISYADSVKGRFTISRDNAKNSLYLQMNSLRAEDTAVYFCARDYDFHSAHYDAFDVWGQGTMVTVSS

SEQ ID NO: 290 - protein, 123 aa, ARTIFICIAL SEQUENCE
  Exemplary Antibody Variable Heavy (VH) Chains
EVQLVESGGGLVKPGGSLRLSCAASGFTFSSHSMNWVRQAPGKGLEWVSSISSHSSYISYADSVKGRFTISRDNAKNSLYLQMNSLRAEDTAVYFCARDYDFHSAYYDAFDVWGQGTMVTVSS

SEQ ID NO: 291 - protein, 123 aa, ARTIFICIAL SEQUENCE
  Exemplary Antibody Variable Heavy (VH) Chains
EVQLVESGGGLVKPGGSLRLSCAASGFTFSSHSMNWVRQAPGKGLEWVSSISSSSSYISYAHSVKGRFTISRDNAKNSLYLQMNSLRAEDTAVYFCARDYDFHSAYYDAFDVWGQGTMVTVSS

SEQ ID NO: 292 - protein, 123 aa, ARTIFICIAL SEQUENCE
  Exemplary Antibody Variable Heavy (VH) Chains
EVQLVESGGGLVKPGGSLRLSCAASGFTFSSHSMNWVRQAPGKGLEWVSSISSSSSYISYADHVKGRFTISRDNAKNSLYLQMNSLRAEDTAVYFCARDYDFHSAYYDAFDVWGQGTMVTVSS

SEQ ID NO: 293 - protein, 123 aa, ARTIFICIAL SEQUENCE
  Exemplary Antibody Variable Heavy (VH) Chains
EVQLVESGGGLVKPGGSLRLSCAASGFTFSSHSMNWVRQAPGKGLEWVSSISSSSSYISYADSVKGRFTISRDNAKNSLYLQMNSLRAEDTAVYFCARDYDFHSAHYDAFDVWGQGTMVTVSS

SEQ ID NO: 294 - protein, 123 aa, ARTIFICIAL SEQUENCE
  Exemplary Antibody Variable Heavy (VH) Chains
EVQLVESGGGLVKPGGSLRLSCAASGFTFSSYSMNWVRQAPGKGLEWVSSISSHSSYHSYADSVKGRFTISRDNAKNSLYLQMNSLRAEDTAVYFCARDYDFHSAYYDAFDVWGQGTMVTVSS

SEQ ID NO: 295 - protein, 123 aa, ARTIFICIAL SEQUENCE
  Exemplary Antibody Variable Heavy (VH) Chains
EVQLVESGGGLVKPGGSLRLSCAASGFTFSSYSMNWVRQAPGKGLEWVSSISSHSSYISYADSVKGRFTISRDNAKNSLYLQMNSLRAEDTAVYFCARDYDFHSAHYDAFDVWGQGTMVTVSS

SEQ ID NO: 296 - protein, 123 aa, ARTIFICIAL SEQUENCE
  Exemplary Antibody Variable Heavy (VH) Chains
EVQLVESGGGLVKPGGSLRLSCAASGFTFSSYSMNWVRQAPGKGLEWVSSISSSSHYHSYADSVKGRFTISRDNAKNSLYLQMNSLRAEDTAVYFCARDYDFHSAYYDAFDVWGQGTMVTVSS

SEQ ID NO: 297 - protein, 123 aa, ARTIFICIAL SEQUENCE
  Exemplary Antibody Variable Heavy (VH) Chains
EVQLVESGGGLVKPGGSLRLSCAASGFTFSSYSMNWVRQAPGKGLEWVSSISSSSHYISHADSVKGRFTISRDNAKNSLYLQMNSLRAEDTAVYFCARDYDFHSAYYDAFDVWGQGTMVTVSS

SEQ ID NO: 298 - protein, 123 aa, ARTIFICIAL SEQUENCE
  Exemplary Antibody Variable Heavy (VH) Chains
EVQLVESGGGLVKPGGSLRLSCAASGFTFSSYSMNWVRQAPGKGLEWVSSISSSSHYISYADHVKGRFTISRDNAKNSLYLQMNSLRAEDTAVYFCARDYDFHSAYYDAFDVWGQGTMVTVSS

SEQ ID NO: 299 - protein, 123 aa, ARTIFICIAL SEQUENCE
  Exemplary Antibody Variable Heavy (VH) Chains
EVQLVESGGGLVKPGGSLRLSCAASGFTFSSYSMNWVRQAPGKGLEWVSSISSSSSYHSYADSVKGRFTISRDNAKNSLYLQMNSLRAEDTAVYFCARDYDFHSAHYDAFDVWGQGTMVTVSS

SEQ ID NO: 300 - protein, 123 aa, ARTIFICIAL SEQUENCE
  Exemplary Antibody Variable Heavy (VH) Chains
EVQLVESGGGLVKPGGSLRLSCAASGFTFSSYSMNWVRQAPGKGLEWVSSISSSSSYHSYADSVKGRFTISRDNAKNSLYLQMNSLRAEDTAVYFCARDYDFHSAYHDAFDVWGQGTMVTVSS

SEQ ID NO: 301 - protein, 123 aa, ARTIFICIAL SEQUENCE
  Exemplary Antibody Variable Heavy (VH) Chains
EVQLVESGGGLVKPGGSLRLSCAASGFTFSSYSMNWVRQAPGKGLEWVSSISSSSSYISHADSVKGRFTISRDNAKNSLYLQMNSLRAEDTAVYFCARDYDFHSAHYDAFDVWGQGTMVTVSS

SEQ ID NO: 302 - protein, 123 aa, ARTIFICIAL SEQUENCE
  Exemplary Antibody Variable Heavy (VH) Chains
EVQLVESGGGLVKPGGSLRLSCAASGFTFSSYSMNWVRQAPGKGLEWVSSISSSSSYISYAHSVKGRFTISRDNAKNSLYLQMNSLRAEDTAVYFCARDYDFHSAHYDAFDVWGQGTMVTVSS

SEQ ID NO: 303 - protein, 123 aa, ARTIFICIAL SEQUENCE
  Exemplary Antibody Variable Heavy (VH) Chains
EVQLVESGGGLVKPGGSLRLSCAASGFTFSSYSMNWVRQAPGKGLEWVSSISSSSSYISYAHSVKGRFTISRDNAKNSLYLQMNSLRAEDTAVYFCARDYDFHSAYHDAFDVWGQGTMVTVSS

SEQ ID NO: 304 - protein, 123 aa, ARTIFICIAL SEQUENCE
  Exemplary Antibody Variable Heavy (VH) Chains
EVQLVESGGGLVKPGGSLRLSCAASGFTFSSYSMNWVRQAPGKGLEWVSSISSSSSYISYADHVKGRFTISRDNAKNSLYLQMNSLRAEDTAVYFCARDYDFHSAHYDAFDVWGQGTMVTVSS

SEQ ID NO: 305 - protein, 127 aa, ARTIFICIAL SEQUENCE; identical to SEQ ID NO: 270
  Exemplary Antibody Variable Heavy (VH) Chains

SEQ ID NO: 306 - protein, 127 aa, ARTIFICIAL SEQUENCE; identical to SEQ ID NO: 270
  Exemplary Antibody Variable Heavy (VH) Chains

SEQ ID NO: 307 - protein, 127 aa, ARTIFICIAL SEQUENCE; identical to SEQ ID NO: 270
  Exemplary Antibody Variable Heavy (VH) Chains

SEQ ID NO: 308 - protein, 127 aa, ARTIFICIAL SEQUENCE; identical to SEQ ID NO: 272
  Exemplary Antibody Variable Heavy (VH) Chains

SEQ ID NO: 309 - protein, 127 aa, ARTIFICIAL SEQUENCE; identical to SEQ ID NO: 272
  Exemplary Antibody Variable Heavy (VH) Chains

SEQ ID NO: 310 - protein, 127 aa, ARTIFICIAL SEQUENCE; identical to SEQ ID NO: 272
  Exemplary Antibody Variable Heavy (VH) Chains

SEQ ID NO: 311 - protein, 127 aa, ARTIFICIAL SEQUENCE; identical to SEQ ID NO: 272
  Exemplary Antibody Variable Heavy (VH) Chains

SEQ ID NO: 312 - protein, 127 aa, ARTIFICIAL SEQUENCE
  Exemplary Antibody Variable Heavy (VH) Chains
EVQLVESGGGLVQPGGSLRLSCAASGFTFSSYWMSWVRQAPGKGLEWVASIKQDGSEKYYVDSVKGRFTISRDNARNSLYLQMNSLRAEDTAVYYCARDLVLFVYDMDYYYYGMDVWGQGTTVTVSS

SEQ ID NO: 313 - protein, 127 aa, ARTIFICIAL SEQUENCE; identical to SEQ ID NO: 312
  Exemplary Antibody Variable Heavy (VH) Chains

SEQ ID NO: 314 - protein, 127 aa, ARTIFICIAL SEQUENCE; identical to SEQ ID NO: 312
  Exemplary Antibody Variable Heavy (VH) Chains

SEQ ID NO: 315 - protein, 127 aa, ARTIFICIAL SEQUENCE; identical to SEQ ID NO: 312
  Exemplary Antibody Variable Heavy (VH) Chains

SEQ ID NO: 316 - protein, 127 aa, ARTIFICIAL SEQUENCE; identical to SEQ ID NO: 312
  Exemplary Antibody Variable Heavy (VH) Chains

SEQ ID NO: 317 - protein, 127 aa, ARTIFICIAL SEQUENCE; identical to SEQ ID NO: 312
  Exemplary Antibody Variable Heavy (VH) Chains

SEQ ID NO: 318 - protein, 127 aa, ARTIFICIAL SEQUENCE
  Exemplary Antibody Variable Heavy (VH) Chains
EVQLVESGGGLVQPGGSLRLSCAASGFTFSSYWMSWVRQAPGKGLEWVASIKQDGSEKYYVDSVKGRFTISRDNARNSLYLQMNSLRAEDTAVYYCARDLVLSVYDMDYYYYGMDVWGQGTTVTVSS

SEQ ID NO: 319 - protein, 127 aa, ARTIFICIAL SEQUENCE; identical to SEQ ID NO: 318
  Exemplary Antibody Variable Heavy (VH) Chains

SEQ ID NO: 320 - protein, 127 aa, ARTIFICIAL SEQUENCE; identical to SEQ ID NO: 318
  Exemplary Antibody Variable Heavy (VH) Chains

SEQ ID NO: 321 - protein, 127 aa, ARTIFICIAL SEQUENCE; identical to SEQ ID NO: 318
  Exemplary Antibody Variable Heavy (VH) Chains

SEQ ID NO: 322 - protein, 127 aa, ARTIFICIAL SEQUENCE; identical to SEQ ID NO: 318
  Exemplary Antibody Variable Heavy (VH) Chains

SEQ ID NO: 323 - protein, 127 aa, ARTIFICIAL SEQUENCE; identical to SEQ ID NO: 318
  Exemplary Antibody Variable Heavy (VH) Chains

SEQ ID NO: 324 - protein, 127 aa, ARTIFICIAL SEQUENCE; identical to SEQ ID NO: 318
  Exemplary Antibody Variable Heavy (VH) Chains

SEQ ID NO: 325 - protein, 127 aa, ARTIFICIAL SEQUENCE; identical to SEQ ID NO: 318
  Exemplary Antibody Variable Heavy (VH) Chains

SEQ ID NO: 326 - protein, 127 aa, ARTIFICIAL SEQUENCE; identical to SEQ ID NO: 312
  Exemplary Antibody Variable Heavy (VH) Chains

SEQ ID NO: 327 - protein, 127 aa, ARTIFICIAL SEQUENCE; identical to SEQ ID NO: 270
  Exemplary Antibody Variable Heavy (VH) Chains

SEQ ID NO: 328 - protein, 127 aa, ARTIFICIAL SEQUENCE; identical to SEQ ID NO: 272
  Exemplary Antibody Variable Heavy (VH) Chains

SEQ ID NO: 329 - protein, 127 aa, ARTIFICIAL SEQUENCE; identical to SEQ ID NO: 272
  Exemplary Antibody Variable Heavy (VH) Chains

SEQ ID NO: 330 - protein, 127 aa, ARTIFICIAL SEQUENCE; identical to SEQ ID NO: 272
  Exemplary Antibody Variable Heavy (VH) Chains

SEQ ID NO: 331 - protein, 127 aa, ARTIFICIAL SEQUENCE; identical to SEQ ID NO: 272
  Exemplary Antibody Variable Heavy (VH) Chains

SEQ ID NO: 332 - protein, 127 aa, ARTIFICIAL SEQUENCE; identical to SEQ ID NO: 318
  Exemplary Antibody Variable Heavy (VH) Chains

SEQ ID NO: 333 - protein, 127 aa, ARTIFICIAL SEQUENCE; identical to SEQ ID NO: 312
  Exemplary Antibody Variable Heavy (VH) Chains

SEQ ID NO: 334 - protein, 127 aa, ARTIFICIAL SEQUENCE; identical to SEQ ID NO: 272
  Exemplary Antibody Variable Heavy (VH) Chains

SEQ ID NO: 335 - protein, 127 aa, ARTIFICIAL SEQUENCE; identical to SEQ ID NO: 312
  Exemplary Antibody Variable Heavy (VH) Chains

SEQ ID NO: 336 - protein, 127 aa, ARTIFICIAL SEQUENCE; identical to SEQ ID NO: 272
  Exemplary Antibody Variable Heavy (VH) Chains

SEQ ID NO: 337 - protein, 127 aa, ARTIFICIAL SEQUENCE; identical to SEQ ID NO: 318
  Exemplary Antibody Variable Heavy (VH) Chains

SEQ ID NO: 338 - protein, 127 aa, ARTIFICIAL SEQUENCE; identical to SEQ ID NO: 318
  Exemplary Antibody Variable Heavy (VH) Chains

SEQ ID NO: 339 - protein, 127 aa, ARTIFICIAL SEQUENCE; identical to SEQ ID NO: 312
  Exemplary Antibody Variable Heavy (VH) Chains

SEQ ID NO: 340 - protein, 127 aa, ARTIFICIAL SEQUENCE
  Exemplary Antibody Variable Heavy (VH) Chains
EVQLVESGGGLVQPGGSLRLSCAASGFTFSSYWMSWVRQAPGKGLEWVASIKQDGSEKYYVDSVKGRFTISRDNARNSLYLQMNSLRAEDTAVYYCARDLVLNVYDMDYYYYGMDVWGQGTTVTVSS

SEQ ID NO: 341 - protein, 127 aa, ARTIFICIAL SEQUENCE; identical to SEQ ID NO: 270
  Exemplary Antibody Variable Heavy (VH) Chains

SEQ ID NO: 342 - protein, 127 aa, ARTIFICIAL SEQUENCE; identical to SEQ ID NO: 340
  Exemplary Antibody Variable Heavy (VH) Chains

SEQ ID NO: 343 - protein, 127 aa, ARTIFICIAL SEQUENCE; identical to SEQ ID NO: 270
  Exemplary Antibody Variable Heavy (VH) Chains

SEQ ID NO: 344 - protein, 127 aa, ARTIFICIAL SEQUENCE; identical to SEQ ID NO: 318
  Exemplary Antibody Variable Heavy (VH) Chains

SEQ ID NO: 345 - protein, 127 aa, ARTIFICIAL SEQUENCE; identical to SEQ ID NO: 340
  Exemplary Antibody Variable Heavy (VH) Chains

SEQ ID NO: 346 - protein, 122 aa, ARTIFICIAL SEQUENCE
  Exemplary Antibody Variable Heavy (VH) Chains
EVHLVESGGGVVQPGRSLRLSCAASGFTFNSFGMHWVRQAPGKGLEWVALIWSDGSDEYYADSVKGRFTISRDNSKNTLYLQMNSLRAEDTAVYYCARAIAALYYYYGMDVWGQGTTVTVSS

SEQ ID NO: 347 - protein, 121 aa, ARTIFICIAL SEQUENCE
  Exemplary Antibody Variable Heavy (VH) Chains
EVQLLESGGGLVQPGGSLRLSCAASGFTFSSYAMNWVRQAPGKGLEWVSTISGSGGNTYYADSVKGRFTISRDNSKNTLYLQMNSLRAEDTAVYYCAKKFVLMVYAMLDYWGQGTLVTVSS

SEQ ID NO: 348 - protein, 127 aa, ARTIFICIAL SEQUENCE; identical to SEQ ID NO: 270
  Exemplary Antibody Variable Heavy (VH) Chains

SEQ ID NO: 349 - protein, 127 aa, ARTIFICIAL SEQUENCE
  Exemplary Antibody Variable Heavy (VH) Chains
EVQLVESGGGLVQPGGSLRLSCAASGFTFSSYWMSWVRQAPGKGLEWVASIKQDGSEKYYVDSVKGRFTISRDNARNSLYLQMNSLRAEDTAVYYCARDLVLMVYDLDYYYYGMDVWGQGTTVTVSS

SEQ ID NO: 350 - protein, 127 aa, ARTIFICIAL SEQUENCE; identical to SEQ ID NO: 272
  Exemplary Antibody Variable Heavy (VH) Chains

SEQ ID NO: 351 - protein, 127 aa, ARTIFICIAL SEQUENCE; identical to SEQ ID NO: 272
  Exemplary Antibody Variable Heavy (VH) Chains

SEQ ID NO: 352 - protein, 127 aa, ARTIFICIAL SEQUENCE; identical to SEQ ID NO: 272
  Exemplary Antibody Variable Heavy (VH) Chains

SEQ ID NO: 353 - protein, 127 aa, ARTIFICIAL SEQUENCE; identical to SEQ ID NO: 272
  Exemplary Antibody Variable Heavy (VH) Chains

SEQ ID NO: 354 - DNA, 339 bp, ARTIFICIAL SEQUENCE
  Coding Sequence for Antibody Variable Light (VL) Chains
gatattgtgatgactcagtctccactctccctgcccgtcacccctggagagccggcctccatctcctgcaggtctagtcagagcctcctgcatagtaatggatacaactatttggattggtacctgcagaagccagggcagtctccacagctcctgatctatttgggttctaatcgggcctccggggtccctgacaggttcagtggcagtggatcaggcacagattttacactgaaaatcagcagagtggaggctgaggatgttggggtttattactgcatgcaagctctacaaactccgctcactttcggcggagggaccaaggtagagatcaaacgg

SEQ ID NO: 355 - DNA, 339 bp, ARTIFICIAL SEQUENCE; identical to SEQ ID NO: 354
  Coding Sequence for Antibody Variable Light (VL) Chains

SEQ ID NO: 356 - DNA, 339 bp, ARTIFICIAL SEQUENCE
  Coding Sequence for Antibody Variable Light (VL) Chains
gatattgtgatgactcagtctccactctccctgcccgtcacccctggagagccggcctccatctcctgcaggtctagtcagagcctcctgcatagtaatggatacaactatttggattggtacctgcagaagccagggcagtctccacagctcctgatctatttgggtctcaatcgggcctccggggtccctgacaggttcagtggcagtggatcaggcacagattttacactgaaaatcagcagagtggaggctgaggatgttggggtttattactgcatgcaagctctacaaactccgctcactttcggcggagggaccaaggtagagatcaaacgg

SEQ ID NO: 357 - DNA, 336 bp, ARTIFICIAL SEQUENCE
  Coding Sequence for Antibody Variable Light (VL) Chains
cagtctgtgctgacgcagccgccctcagtgtctggggccccagggcagagggtcaccatctcctgcactgggagcaggtccaacatcggggcaggttatgatgtaaattggtaccagcagcttccaggaacagcccccaaactcctcatctatggtaacagcaatcggccctctggggtccctgaccgattctctggctccaagtctggcacctcagcctccctggtcatcactgggctccaggctgaggatgaggctgattattactgccagtcctatgacagtaacctgagtggttcggtattcggcggagggaccaagctgaccgtcctaggt

SEQ ID NO: 358 - DNA, 342 bp, ARTIFICIAL SEQUENCE
  Coding Sequence for Antibody Variable Light (VL) Chains
gacatcgtgctgacccagtctccagattttctggctgtgtctctgggcgagagggccaccatcaactgtaagtccagccagaatgttttatacagctccagcaataagaactacttagtttggtaccagcacaaaccaggacagcctcctaaactgctcatttactgggcatctacccgggaatccggggtccctgaccgattcagtggcagcgggtctgggacagatttcactctcaccatcagcagcctgcaggctgaagatgtggcagtttattactgtcatcaatattatagtactccgtggacgttcggccaagggaccaaggtggaaatcaaacga

SEQ ID NO: 359 - DNA, 333 bp, ARTIFICIAL SEQUENCE
  Coding Sequence for Antibody Variable Light (VL) Chains
cagtctgtgctgactcagccaccctcagcgtctgggacccccgggcagagggtcaccatctcttgttctggaagcaactccaacatcggaagtaatactgttaactggtatcagcaggtcccaggaacggcccccaaactcctcatctatagtaataatcagcggccctcaggggtccctgaccgattctctggctccaagtctggcacctcagcctccctggccatcagtgggctccagtctgaggatgaggctgattattactgtgcagcatgggatgacagcctgaatggttgggtgttcggcggagggaccaagctgaccgtcctaggt

SEQ ID NO: 360 - DNA, 330 bp, ARTIFICIAL SEQUENCE
  Coding Sequence for Antibody Variable Light (VL) Chains
cagtctgccctgactcagcctgcctccgtgtctgggtctcctggacagtcgatcaccatctcctgcactggaaccagcagtgacgttggtggttataactctgtctcctggtaccaacagcacccaggcaaaccccccaaactcatgatttatgaggtcagtaatcggccctcagggatttctaatcgcttctctggctccaagtctggcaacacggcctccctgaccatctctgggctccaggctgaggacgaggctgattatttctgcagctcatatacaagcaccagcatggtcttcggcggagggaccaagctggccgtcctacgt

SEQ ID NO: 361 - DNA, 330 bp, ARTIFICIAL SEQUENCE
  Coding Sequence for Antibody Variable Light (VL) Chains
cagtctgccctgactcagcctgcctccgtgtctgggtctcctggacagtcgatcaccatctcctgcactggaaccagcagtgacgttggtggttataactctgtctcctggtaccaacagcacccaggcaaaccccccaaactcatgatttatgaggtcagtaatcggccctcaggggtttctaatcgcttctctggctccaagtctgccaacacggcctccctgaccatctctgggctccaggctgatgacgaggctgattatttctgcagctcatatacaagcaccagcatggtcttcggcggagggaccaagctgaccgtcctacgt

SEQ ID NO: 362 - DNA, 336 bp, ARTIFICIAL SEQUENCE
  Coding Sequence for Antibody Variable Light (VL) Chains
gagtctgtgctgacgcagccgccctcagtgtctggggccccagggcagagggtcaccatctcctgcactgggagcagctccaacatcggggcaggtcacgatgtacactggtaccagcagcttccaggaacagcccccaaactcctcatctctggtaacagcaatcggccctcaggggtccctgaccgattctctggctccaagtctggcacctcagcctccctggccatcactgggctccaggctgaggatgaggctgattattactgccagtcctatgacagcagcctgagtggttcggtattcggcggagggaccaagctgaccgtcctaggt

SEQ ID NO: 363 - DNA, 336 bp, ARTIFICIAL SEQUENCE; identical to SEQ ID NO: 362
  Coding Sequence for Antibody Variable Light (VL) Chains

SEQ ID NO: 364 - DNA, 336 bp, ARTIFICIAL SEQUENCE; identical to SEQ ID NO: 362
  Coding Sequence for Antibody Variable Light (VL) Chains

SEQ ID NO: 365 - DNA, 336 bp, ARTIFICIAL SEQUENCE; identical to SEQ ID NO: 362
  Coding Sequence for Antibody Variable Light (VL) Chains

SEQ ID NO: 366 - DNA, 336 bp, ARTIFICIAL SEQUENCE
  Coding Sequence for Antibody Variable Light (VL) Chains
gagtctgtgctgacgcagccgccctcagtgtctggggccccagggcagagggtcaccatctcctgcactgggagcagctccaacatcggggcaggttatgatgtacactggtaccagcagcttccaggaacagcccccaaactcctcatctctggtaacagcaatcggccctcaggggtccctgaccgattctctggctccaagtctggcacctcagcctccctggccatcactgggctccaggctgaggatgaggctgattattactgccagtcctatgacagcagcctgcacggttcggtattcggcggagggaccaagctgaccgtcctaggt

SEQ ID NO: 367 - DNA, 336 bp, ARTIFICIAL SEQUENCE; identical to SEQ ID NO: 366
  Coding Sequence for Antibody Variable Light (VL) Chains

SEQ ID NO: 368 - DNA, 336 bp, ARTIFICIAL SEQUENCE; identical to SEQ ID NO: 366
  Coding Sequence for Antibody Variable Light (VL) Chains

SEQ ID NO: 369 - DNA, 336 bp, ARTIFICIAL SEQUENCE
  Coding Sequence for Antibody Variable Light (VL) Chains
gagtctgtgctgacgcagccgccctcagtgtctggggccccagggcagagggtcaccatctcctgcactgggagcagctccaacatcggggcaggttatgatgtacactggtaccagcagcttccaggaacagcccccaaactcctcatctctggtaacagcaatcggccctcaggggtccctgaccgattctctggctccaagtctggcacctcagcctccctggccatcactgggctccaggctgaggatgaggctgattattactgccagtcctatgacagcagcctgagtggttcggtattcggcggagggaccaagctgaccgtcctaggt

SEQ ID NO: 370 - DNA, 336 bp, ARTIFICIAL SEQUENCE; identical to SEQ ID NO: 369
  Coding Sequence for Antibody Variable Light (VL) Chains

SEQ ID NO: 371 - DNA, 336 bp, ARTIFICIAL SEQUENCE; identical to SEQ ID NO: 369
  Coding Sequence for Antibody Variable Light (VL) Chains

SEQ ID NO: 372 - DNA, 336 bp, ARTIFICIAL SEQUENCE; identical to SEQ ID NO: 369
  Coding Sequence for Antibody Variable Light (VL) Chains

SEQ ID NO: 373 - DNA, 336 bp, ARTIFICIAL SEQUENCE; identical to SEQ ID NO: 369
  Coding Sequence for Antibody Variable Light (VL) Chains

SEQ ID NO: 374 - DNA, 336 bp, ARTIFICIAL SEQUENCE; identical to SEQ ID NO: 369
  Coding Sequence for Antibody Variable Light (VL) Chains

SEQ ID NO: 375 - DNA, 336 bp, ARTIFICIAL SEQUENCE; identical to SEQ ID NO: 369
  Coding Sequence for Antibody Variable Light (VL) Chains

SEQ ID NO: 376 - DNA, 336 bp, ARTIFICIAL SEQUENCE; identical to SEQ ID NO: 369
  Coding Sequence for Antibody Variable Light (VL) Chains

SEQ ID NO: 377 - DNA, 336 bp, ARTIFICIAL SEQUENCE; identical to SEQ ID NO: 369
  Coding Sequence for Antibody Variable Light (VL) Chains

SEQ ID NO: 378 - DNA, 336 bp, ARTIFICIAL SEQUENCE; identical to SEQ ID NO: 369
  Coding Sequence for Antibody Variable Light (VL) Chains

SEQ ID NO: 379 - DNA, 336 bp, ARTIFICIAL SEQUENCE; identical to SEQ ID NO: 369
  Coding Sequence for Antibody Variable Light (VL) Chains

SEQ ID NO: 380 - DNA, 336 bp, ARTIFICIAL SEQUENCE; identical to SEQ ID NO: 369
  Coding Sequence for Antibody Variable Light (VL) Chains

SEQ ID NO: 381 - DNA, 336 bp, ARTIFICIAL SEQUENCE; identical to SEQ ID NO: 369
  Coding Sequence for Antibody Variable Light (VL) Chains

SEQ ID NO: 382 - DNA, 336 bp, ARTIFICIAL SEQUENCE; identical to SEQ ID NO: 369
  Coding Sequence for Antibody Variable Light (VL) Chains

SEQ ID NO: 383 - DNA, 336 bp, ARTIFICIAL SEQUENCE; identical to SEQ ID NO: 369
  Coding Sequence for Antibody Variable Light (VL) Chains

SEQ ID NO: 384 - DNA, 336 bp, ARTIFICIAL SEQUENCE; identical to SEQ ID NO: 369
  Coding Sequence for Antibody Variable Light (VL) Chains

SEQ ID NO: 385 - DNA, 336 bp, ARTIFICIAL SEQUENCE; identical to SEQ ID NO: 369
  Coding Sequence for Antibody Variable Light (VL) Chains

SEQ ID NO: 386 - DNA, 336 bp, ARTIFICIAL SEQUENCE; identical to SEQ ID NO: 369
  Coding Sequence for Antibody Variable Light (VL) Chains

SEQ ID NO: 387 - DNA, 336 bp, ARTIFICIAL SEQUENCE; identical to SEQ ID NO: 369
  Coding Sequence for Antibody Variable Light (VL) Chains

SEQ ID NO: 388 - DNA, 336 bp, ARTIFICIAL SEQUENCE; identical to SEQ ID NO: 369
  Coding Sequence for Antibody Variable Light (VL) Chains

SEQ ID NO: 389 - DNA, 339 bp, ARTIFICIAL SEQUENCE
  Coding Sequence for Antibody Variable Light (VL) Chains
gatattgtgatgactcagtctccactctccctgcccgtcacccctggagagccggcctccatctcctgcaggtctagtcagagcctcctgcatagtaatggacacaactatttggattggtacctgcagaagccagggcagtctccacagctcctgatctatttgggtctcaatcgggcctccggggtccctgacaggttcagtggcagtggatcaggcacagattttacactgaaaatcagcagagtggaggctgaggatgttggggtttattactgcatgcaagctctacaaactccgctcactttcggcggagggaccaaggtagagatcaaacgg

SEQ ID NO: 390 - DNA, 339 bp, ARTIFICIAL SEQUENCE
  Coding Sequence for Antibody Variable Light (VL) Chains
gatattgtgatgactcagtctccactctccctgcccgtcacccctggagagccggcctccatctcctgcaggtctagtcagagcctcctgcatagtaatggacacaactatttggattggtacctgcagaagccagggcagtctccacagctcctgatctatttgggtctcaatcgggcccacggggtccctgacaggttcagtggcagtggatcaggcacagattttacactgaaaatcagcagagtggaggctgaggatgttggggtttattactgcatgcaagctctacaaactccgctcactttcggcggagggaccaaggtagagatcaaacgg

SEQ ID NO: 391 - DNA, 339 bp, ARTIFICIAL SEQUENCE
  Coding Sequence for Antibody Variable Light (VL) Chains
gatattgtgatgactcagtctccactctccctgcccgtcacccctggagagccggcctccatctcctgcaggtctagtcagagcctcctgcatagtaatggacacaactatttggattggtacctgcagaagccagggcagtctccacagctcctgatctatttgggtctcaatcgggcctccggggtccctgacaggttcagtggcagtggacacggcacagattttacactgaaaatcagcagagtggaggctgaggatgttggggtttattactgcatgcaagctctacaaactccgctcactttcggcggagggaccaaggtagagatcaaacgg

SEQ ID NO: 392 - DNA, 339 bp, ARTIFICIAL SEQUENCE
  Coding Sequence for Antibody Variable Light (VL) Chains
gatattgtgatgactcagtctccactctccctgcccgtcacccctggagagccggcctccatctcctgcaggtctagtcagagcctcctgcatagttacggatacaactatttggattggtacctgcagaagccagggcagtctccacagctcctgatctatttgggttctaatcgggcctccggggtccctgacaggttcagtggcagtggatcaggcacagattttacactgaaaatcagcagagtggaggctgaggatgttggggtttattactgcatgcaagctctacaaactccgctcactttcggcggagggaccaaggtagagatcaaacgg

SEQ ID NO: 393 - DNA, 339 bp, ARTIFICIAL SEQUENCE
  Coding Sequence for Antibody Variable Light (VL) Chains
gatattgtgatgactcagtctccactctccctgcccgtcacccctggagagccggcctccatctcctgcaggtctagtcagagcctcctgcatagtttcggatacaactatttggattggtacctgcagaagccagggcagtctccacagctcctgatctatttgggttctaatcgggcctccggggtccctgacaggttcagtggcagtggatcaggcacagattttacactgaaaatcagcagagtggaggctgaggatgttggggtttattactgcatgcaagctctacaaactccgctcactttcggcggagggaccaaggtagagatcaaacgg

SEQ ID NO: 394 - DNA, 339 bp, ARTIFICIAL SEQUENCE; identical to SEQ ID NO: 356
  Coding Sequence for Antibody Variable Light (VL) Chains

SEQ ID NO: 395 - DNA, 339 bp, ARTIFICIAL SEQUENCE
  Coding Sequence for Antibody Variable Light (VL) Chains
gatattgtgatgactcagtctccactctccctgcccgtcacccctggagagccggcctccatctcctgcaggtctagtcagagcctcctgcatagtttcggatacaactatttggattggtacctgcagaagccagggcagtctccacagctcctgatctatttgggtctcaatcgggcctccggggtccctgacaggttcagtggcagtggatcaggcacagattttacactgaaaatcagcagagtggaggctgaggatgttggggtttattactgcatgcaagctctacaaactccgctcactttcggcggagggaccaaggtagagatcaaacgg

SEQ ID NO: 396 - DNA, 339 bp, ARTIFICIAL SEQUENCE
  Coding Sequence for Antibody Variable Light (VL) Chains
gatattgtgatgactcagtctccactctccctgcccgtcacccctggagagccggcctccatctcctgcaggtctagtcagagcctcctgcatagtttcggatacaactatttggattggtacctgcagaagccagggcagtctccacagctcctgatctatttgggtatgaatcgggcctccggggtccctgacaggttcagtggcagtggatcaggcacagattttacactgaaaatcagcagagtggaggctgaggatgttggggtttattactgcatgcaagctctacaaactccgctcactttcggcggagggaccaaggtagagatcaaacgg

SEQ ID NO: 397 - DNA, 339 bp, ARTIFICIAL SEQUENCE
  Coding Sequence for Antibody Variable Light (VL) Chains
gatattgtgatgactcagtctccactctccctgcccgtcacccctggagagccggcctccatctcctgcaggtctagtcagagcctcctgcatagtttcggatacaactatttggattggtacctgcagaagccagggcagtctccacagctcctgatctatttgggttttaatcgggcctccggggtccctgacaggttcagtggcagtggatcaggcacagattttacactgaaaatcagcagagtggaggctgaggatgttggggtttattactgcatgcaagctctacaaactccgctcactttcggcggagggaccaaggtagagatcaaacgg

SEQ ID NO: 398 - DNA, 339 bp, ARTIFICIAL SEQUENCE
  Coding Sequence for Antibody Variable Light (VL) Chains
gatattgtgatgactcagtctccactctccctgcccgtcacccctggagagccggcctccatctcctgcaggtctagtcagagcctcctgcatagtttcggatacaactatttggattggtacctgcagaagccagggcagtctccacagctcctgatctatttgggtcataatcgggcctccggggtccctgacaggttcagtggcagtggatcaggcacagattttacactgaaaatcagcagagtggaggctgaggatgttggggtttattactgcatgcaagctctacaaactccgctcactttcggcggagggaccaaggtagagatcaaacgg

SEQ ID NO: 399 - DNA, 339 bp, ARTIFICIAL SEQUENCE
  Coding Sequence for Antibody Variable Light (VL) Chains
gatattgtgatgactcagtctccactctccctgcccgtcacccctggagagccggcctccatctcctgcaggtctagtcagagcctcctgcatagtttcggatacaactatttggattggtacctgcagaagccagggcagtctccacagctcctgatctatttgggtaataatcgggcctccggggtccctgacaggttcagtggcagtggatcaggcacagattttacactgaaaatcagcagagtggaggctgaggatgttggggtttattactgcatgcaagctctacaaactccgctcactttcggcggagggaccaaggtagagatcaaacgg

SEQ ID NO: 400 - DNA, 339 bp, ARTIFICIAL SEQUENCE
  Coding Sequence for Antibody Variable Light (VL) Chains
gatattgtgatgactcagtctccactctccctgcccgtcacccctggagagccggcctccatctcctgcaggtctagtcagagcctcctgcatagtttcggatacaactatttggattggtacctgcagaagccagggcagtctccacagctcctgatctatttgggttggaatcgggcctccggggtccctgacaggttcagtggcagtggatcaggcacagattttacactgaaaatcagcagagtggaggctgaggatgttggggtttattactgcatgcaagctctacaaactccgctcactttcggcggagggaccaaggtagagatcaaacgg

SEQ ID NO: 401 - DNA, 339 bp, ARTIFICIAL SEQUENCE
  Coding Sequence for Antibody Variable Light (VL) Chains
gatattgtgatgactcagtctccactctccctgcccgtcacccctggagagccggcctccatctcctgcaggtctagtcagagcctcctgcatagtttcggatacaactatttggattggtacctgcagaagccagggcagtctccacagctcctgatctatttgggtcaaaatcgggcctccggggtccctgacaggttcagtggcagtggatcaggcacagattttacactgaaaatcagcagagtggaggctgaggatgttggggtttattactgcatgcaagctctacaaactccgctcactttcggcggagggaccaaggtagagatcaaacgg

SEQ ID NO: 402 - DNA, 342 bp, ARTIFICIAL SEQUENCE
  Coding Sequence for Antibody Variable Light (VL) Chains
gatattgtgatgactcagtctccactctccctgcccgtcacccctggagagccggcctccatctcctgcaggtctagtcagagcctcctgcatagtggtaatggatacaactatttggattggtacctgcagaagccagggcagtctccacagctcctgatctatttgggtctcaatcgggcctccggggtccctgacaggttcagtggcagtggatcaggcacagattttacactgaaaatcagcagagtggaggctgaggatgttggggtttattactgcatgcaagctatccatactccgctcactttcggcggagggaccaaggtagagatcaaacgg

SEQ ID NO: 403 - DNA, 342 bp, ARTIFICIAL SEQUENCE
  Coding Sequence for Antibody Variable Light (VL) Chains
gatattgtgatgactcagtctccactctccctgcccgtcacccctggagagccggcctccatctcctgcaggtctagtcagtcgctcctgcatagtgggaatggatacaactatttggattggtacctgcagaagccagggcagtctccacagctcctgatctatttgggtatgaatcgggcctccggggtccctgacaggttcagtggcagtggatcaggcacagattttacactgaaaatcagcagagtggaggctgaggatgttggggtttattactgcatgcaagctatccacactccgctcactttcggcggagggaccaaggtagagatcaaacgg

SEQ ID NO: 404 - DNA, 342 bp, ARTIFICIAL SEQUENCE
  Coding Sequence for Antibody Variable Light (VL) Chains
gatattgtgatgactcagtctccactctccctgcccgtcacccctggagagccggcctccatctcctgcaggtctagtcagtcgctcctgcatagtgggaatggatacaactatttggattggtacctgcagaagccagggcagtctccacagctcctgatctatttgggttttaatcgggcctccggggtccctgacaggttcagtggcagtggatcaggcacagattttacactgaaaatcagcagagtggaggctgaggatgttggggtttattactgcatgcaagctatccacactccgctcactttcggcggagggaccaaggtagagatcaaacgg

SEQ ID NO: 405 - DNA, 342 bp, ARTIFICIAL SEQUENCE
  Coding Sequence for Antibody Variable Light (VL) Chains
gatattgtgatgactcagtctccactctccctgcccgtcacccctggagagccggcctccatctcctgcaggtctagtcagtcgctcctgcatagtgggaatggatacaactatttggattggtacctgcagaagccagggcagtctccacagctcctgatctatttgggtcataatcgggcctccggggtccctgacaggttcagtggcagtggatcaggcacagattttacactgaaaatcagcagagtggaggctgaggatgttggggtttattactgcatgcaagctatccacactccgctcactttcggcggagggaccaaggtagagatcaaacgg

SEQ ID NO: 406 - DNA, 342 bp, ARTIFICIAL SEQUENCE
  Coding Sequence for Antibody Variable Light (VL) Chains
gatattgtgatgactcagtctccactctccctgcccgtcacccctggagagccggcctccatctcctgcaggtctagtcagtcgctcctgcatagtgggaatggatacaactatttggattggtacctgcagaagccagggcagtctccacagctcctgatctatttgggtaataatcgggcctccggggtccctgacaggttcagtggcagtggatcaggcacagattttacactgaaaatcagcagagtggaggctgaggatgttggggtttattactgcatgcaagctatccacactccgctcactttcggcggagggaccaaggtagagatcaaacgg

SEQ ID NO: 407 - DNA, 342 bp, ARTIFICIAL SEQUENCE
  Coding Sequence for Antibody Variable Light (VL) Chains
gatattgtgatgactcagtctccactctccctgcccgtcacccctggagagccggcctccatctcctgcaggtctagtcagtcgctcctgcatagtgggaatggatacaactatttggattggtacctgcagaagccagggcagtctccacagctcctgatctatttgggttggaatcgggcctccggggtccctgacaggttcagtggcagtggatcaggcacagattttacactgaaaatcagcagagtggaggctgaggatgttggggtttattactgcatgcaagctatccacactccgctcactttcggcggagggaccaaggtagagatcaaacgg

SEQ ID NO: 408 - DNA, 342 bp, ARTIFICIAL SEQUENCE
  Coding Sequence for Antibody Variable Light (VL) Chains
gatattgtgatgactcagtctccactctccctgcccgtcacccctggagagccggcctccatctcctgcaggtctagtcagtcgctcctgcatagtgggaatggatacaactatttggattggtacctgcagaagccagggcagtctccacagctcctgatctatttgggtcaaaatcgggcctccggggtccctgacaggttcagtggcagtggatcaggcacagattttacactgaaaatcagcagagtggaggctgaggatgttggggtttattactgcatgcaagctatccacactccgctcactttcggcggagggaccaaggtagagatcaaacgg

SEQ ID NO: 409 - DNA, 339 bp, ARTIFICIAL SEQUENCE
  Coding Sequence for Antibody Variable Light (VL) Chains
gatattgtgatgactcagtctccactctccctgcccgtcacccctggagagccggcctccatctcctgcaggtctagtcagagcctcctgcatagtaatggatacaactatttggattggtacctgcagaagccagggcagtctccacagctcctgatctatttgggtctcgcacgggcctccggggtccctgacaggttcagtggcagtggatcaggcacagattttacactgaaaatcagcagagtggaggctgaggatgttggggtttattactgcatgcaagctctacaaactccgctcactttcggcggagggaccaaggtagagatcaaacgg

SEQ ID NO: 410 - DNA, 339 bp, ARTIFICIAL SEQUENCE; identical to SEQ ID NO: 409
  Coding Sequence for Antibody Variable Light (VL) Chains

SEQ ID NO: 411 - DNA, 342 bp, ARTIFICIAL SEQUENCE; identical to SEQ ID NO: 402
  Coding Sequence for Antibody Variable Light (VL) Chains

SEQ ID NO: 412 - DNA, 339 bp, ARTIFICIAL SEQUENCE; identical to SEQ ID NO: 389
  Coding Sequence for Antibody Variable Light (VL) Chains

SEQ ID NO: 413 - DNA, 339 bp, ARTIFICIAL SEQUENCE; identical to SEQ ID NO: 390
  Coding Sequence for Antibody Variable Light (VL) Chains

SEQ ID NO: 414 - DNA, 342 bp, ARTIFICIAL SEQUENCE; identical to SEQ ID NO: 402
  Coding Sequence for Antibody Variable Light (VL) Chains

SEQ ID NO: 415 - DNA, 342 bp, ARTIFICIAL SEQUENCE
  Coding Sequence for Antibody Variable Light (VL) Chains
gatattgtgatgactcagtctccactctccctgcccgtcacccctggagagccggcctccatctcctgcaggtctagtcagagcctcctgcatagtggtaatggatacaactatttggattggtacctgcagaagccagggcagtctccacagctcctgatctatttgggtctcaatcgggcctccggggtccctgacaggttcagtggcagtggatcaggcacagattttacactgaaaatcagcagagtggaggctgaggatgttggggtttattactgcatgcaagctctacaaactccgctcactttcggcggagggaccaaggtagagatcaaacgg

SEQ ID NO: 416 - DNA, 339 bp, ARTIFICIAL SEQUENCE; identical to SEQ ID NO: 390
  Coding Sequence for Antibody Variable Light (VL) Chains

SEQ ID NO: 417 - DNA, 339 bp, ARTIFICIAL SEQUENCE; identical to SEQ ID NO: 395
  Coding Sequence for Antibody Variable Light (VL) Chains

SEQ ID NO: 418 - DNA, 339 bp, ARTIFICIAL SEQUENCE; identical to SEQ ID NO: 395
  Coding Sequence for Antibody Variable Light (VL) Chains

SEQ ID NO: 419 - DNA, 339 bp, ARTIFICIAL SEQUENCE
  Coding Sequence for Antibody Variable Light (VL) Chains
gatattgtgatgactcagtctccactctccctgcccgtcacccctggagagccggcctccatctcctgcaggtctagtcagagcctcctgcatagttttggacacaactatttggattggtacctgcagaagccagggcagtctccacagctcctgatctatttgggtctcaatcgggcccacggggtccctgacaggttcagtggcagtggatcaggcacagattttacactgaaaatcagcagagtggaggctgaggatgttggggtttattactgcatgcaagctctacaaactccgctcactttcggcggagggaccaaggtagagatcaaacgg

SEQ ID NO: 420 - DNA, 339 bp, ARTIFICIAL SEQUENCE; identical to SEQ ID NO: 419
  Coding Sequence for Antibody Variable Light (VL) Chains

SEQ ID NO: 421 - DNA, 342 bp, ARTIFICIAL SEQUENCE; identical to SEQ ID NO: 402
  Coding Sequence for Antibody Variable Light (VL) Chains

SEQ ID NO: 422 - DNA, 723 bp, ARTIFICIAL SEQUENCE
  Coding Sequence for Antibody Variable Light (VL) Chains
atggacatgagggtgcccgctcagctcctggggctcctgctgctgtggctgagaggtgccagatgtgatattgtgatgactcagtctccactctccctgcccgtcacccctggagagccggcctccatctcctgcaggtctagtcagagcctcctgcatagtaatggacacaactatttggattggtacctgcagaagccagggcagtctccacagctcctgatctatttgggtctcaatcgggcccacggggtccctgacaggttcagtggcagtggatcaggcacagattttacactgaaaatcagcagagtggaggctgaggatgttggggtttattactgcatgcaagctctacaaactccgctcactttcggcggagggaccaaggtagagatcaaacggactgtggctgcaccatctgtcttcatcttcccgccatctgatgagcagttgaaatctggaactgcctctgttgtgtgcctgctgaataacttctatcccagagaggccaaagtacagtggaaggtggataacgccctccaatcgggtaactcccaggagagtgtcacagagcaggacagcaaggacagcacctacagcctcagcagcaccctgacgctgagcaaagcagactacgagaaacacaaagtctacgcctgcgaagtcacccatcagggcctgagctcgcccgtcacaaagagcttcaacaggggagagtgt

SEQ ID NO: 423 - DNA, 723 bp, ARTIFICIAL SEQUENCE
  Coding Sequence for Antibody Variable Light (VL) Chains
atggacatgagggtgcccgctcagctcctggggctcctgctgctgtggctgagaggtgccagatgtgatattgtgatgactcagtctccactctccctgcccgtcacccctggagagccggcctccatctcctgcaggtctagtcagagcctcctgcatagtttcggatacaactatttggattggtacctgcagaagccagggcagtctccacagctcctgatctatttgggtctcaatcgggcctccggggtccctgacaggttcagtggcagtggatcaggcacagattttacactgaaaatcagcagagtggaggctgaggatgttggggtttattactgcatgcaagctctacaaactccgctcactttcggcggagggaccaaggtagagatcaaacggactgtggctgcaccatctgtcttcatcttcccgccatctgatgagcagttgaaatctggaactgcctctgttgtgtgcctgctgaataacttctatcccagagaggccaaagtacagtggaaggtggataacgccctccaatcgggtaactcccaggagagtgtcacagagcaggacagcaaggacagcacctacagcctcagcagcaccctgacgctgagcaaagcagactacgagaaacacaaagtctacgcctgcgaagtcacccatcagggcctgagctcgcccgtcacaaagagcttcaacaggggagagtgt

SEQ ID NO: 424 - DNA, 339 bp, ARTIFICIAL SEQUENCE; identical to SEQ ID NO: 390
  Coding Sequence for Antibody Variable Light (VL) Chains

SEQ ID NO: 425 - DNA, 339 bp, ARTIFICIAL SEQUENCE; identical to SEQ ID NO: 395
  Coding Sequence for Antibody Variable Light (VL) Chains

SEQ ID NO: 426 - DNA, 339 bp, ARTIFICIAL SEQUENCE; identical to SEQ ID NO: 395
  Coding Sequence for Antibody Variable Light (VL) Chains

SEQ ID NO: 427 - DNA, 339 bp, ARTIFICIAL SEQUENCE; identical to SEQ ID NO: 419
  Coding Sequence for Antibody Variable Light (VL) Chains

SEQ ID NO: 428 - DNA, 339 bp, ARTIFICIAL SEQUENCE
  Coding Sequence for Antibody Variable Light (VL) Chains
gatattgtgatgactcagtctccactctccctgcccgtcacccctggagagccggcctccatctcctgcaggtctagtcagagcctcctgcatagttatggacacaactatttggattggtacctgcagaagccagggcagtctccacagctcctgatctatttgggtctcaatcgggcccacggggtccctgacaggttcagtggcagtggatcaggcacagattttacactgaaaatcagcagagtggaggctgaggatgttggggtttattactgcatgcaagctctacaaactccgctcactttcggcggagggaccaaggtagagatcaaacgg

SEQ ID NO: 429 - DNA, 339 bp, ARTIFICIAL SEQUENCE; identical to SEQ ID NO: 428
  Coding Sequence for Antibody Variable Light (VL) Chains

SEQ ID NO: 430 - DNA, 333 bp, ARTIFICIAL SEQUENCE
  Coding Sequence for Antibody Variable Light (VL) Chains
gagtctgtgttgacgcagccgccctcagtgtctgcggccccaggacagaaggtcaccatctcctgctctggaagcagctccaacattgggaataattttgtatcctggtaccagcagctcccaggaacagcccccaaactcctcatttatgactataataagcgaccctcagggattcctgaccgattctctggctccaagtctggcacgtcagccaccctgggcatcaccggactccagactggggacgaggccgattattactgcggaacatgggatagcagcctgagtgcttatgtcttcggaactgggaccagggtcaccgtcctaggt

SEQ ID NO: 431 - DNA, 324 bp, ARTIFICIAL SEQUENCE
  Coding Sequence for Antibody Variable Light (VL) Chains
gacatccagatgacccagtctccatcctccctatctgcatctgtaggagacagagtcaccatcacttgccgggcaagtcagagcattagcatctatttaaattggtatcagcagaagccagggaaagccccttacctcctgatctatgctgcagccagtttgcaaagtggggtcccatcaaggttcagtggcagtggatctgggacagatttcactctcaccatcagcagtctgcaacctgaagattttgcaacttactactgtcaacagagttacagtgcccccatcaccttcggccaagggacacgactggagattaaacgt

SEQ ID NO: 432 - DNA, 339 bp, ARTIFICIAL SEQUENCE
  Coding Sequence for Antibody Variable Light (VL) Chains
gatattgtgatgactcagtctccactctccctgcccgtcacccctggagagccggcctccatctcctgcaggtctagtcagagcctcctgcatagtaatggatacaactatttggattggtacctgcagaagccagggcagtctccacagctcctgatctatttgggttctaatcgggcctccggggtccctgacaggttcagtggcagtggatcaggcacagattttacactgaaaatcagcagagtggaggctgaggatgttggggtttattactgcatgcaagctatgcaaactccgctcactttcggcggagggaccaaggtagagatcaaacgg

SEQ ID NO: 433 - DNA, 339 bp, ARTIFICIAL SEQUENCE; identical to SEQ ID NO: 354
  Coding Sequence for Antibody Variable Light (VL) Chains

SEQ ID NO: 434 - DNA, 339 bp, ARTIFICIAL SEQUENCE
  Coding Sequence for Antibody Variable Light (VL) Chains
gatattgtgatgactcagtctccactctccctgcccgtcacccctggagagccggcctccatctcctgcaggtctagtcagagcctcctgcatagtaatatgtacaactatttggattggtacctgcagaagccagggcagtctccacagctcctgatctatttgggttctaatcgggcctccggggtccctgacaggttcagtggcagtggatcaggcacagattttacactgaaaatcagcagagtggaggctgaggatgttggggtttattactgcatgcaagctctacaaactccgctcactttcggcggagggaccaaggtagagatcaaacgg

SEQ ID NO: 435 - DNA, 339 bp, ARTIFICIAL SEQUENCE
  Coding Sequence for Antibody Variable Light (VL) Chains
gatattgtgatgactcagtctccactctccctgcccgtcacccctggagagccggcctccatctcctgcaggtctagtcagagcctcctgcatagtaatcagtacaactatttggattggtacctgcagaagccagggcagtctccacagctcctgatctatttgggttctaatcgggcctccggggtccctgacaggttcagtggcagtggatcaggcacagattttacactgaaaatcagcagagtggaggctgaggatgttggggtttattactgcatgcaagctctacaaactccgctcactttcggcggagggaccaaggtagagatcaaacgg

SEQ ID NO: 436 - DNA, 339 bp, ARTIFICIAL SEQUENCE
  Coding Sequence for Antibody Variable Light (VL) Chains
gatattgtgatgactcagtctccactctccctgcccgtcacccctggagagccggcctccatctcctgcaggtctagtcagagcctcatgcatagtaatggatacaactatttggattggtacctgcagaagccagggcagtctccacagctcctgatctatttgggttctaatcgggcctccggggtccctgacaggttcagtggcagtggatcaggcacagattttacactgaaaatcagcagagtggaggctgaggatgttggggtttattactgcatgcaagctctacaaactccgctcactttcggcggagggaccaaggtagagatcaaacgg

SEQ ID NO: 437 - DNA, 339 bp, ARTIFICIAL SEQUENCE
  Coding Sequence for Antibody Variable Light (VL) Chains
gatattgtgatgactcagtctccactctccctgcccgtcacccctggagagccggcctccatctcctgcaggtctagtcagagcctcctgcatagtaatggatacaactatttggattggtacctgcagaagccagggcagtctccacagctcctgatctatttgggtatcaatcgggcctccggggtccctgacaggttcagtggcagtggatcaggcacagattttacactgaaaatcagcagagtggaggctgaggatgttggggtttattactgcatgcaagctctacaaactccgctcactttcggcggagggaccaaggtagagatcaaacgg

SEQ ID NO: 438 - DNA, 381 bp, ARTIFICIAL SEQUENCE
  Coding Sequence for Antibody Variable Heavy (VH) Chains
gaggtgcagctggtggagtctgggggaggcttggtccagcctggggggtccctgagactctcctgtgcagcctccggattcacctttagtagctattggatgagctgggtccgccaggctccagggaaggggctggagtgggtggccagcataaaacaagatggaagtgagaaatactatgtggactctgtgaagggccgattcaccatctccagagacaacgccaggaactcactgtatctgcaaatgaacagcctgagagccgaggacacggctgtgtattactgtgcgagagatcttgtattaatggtgtatgatatagactactactactacggtatggacgtctggggccaagggaccacggtcaccgtctcctca

SEQ ID NO: 439 - DNA, 381 bp, ARTIFICIAL SEQUENCE; identical to SEQ ID NO: 438
  Coding Sequence for Antibody Variable Heavy (VH) Chains

SEQ ID NO: 440 - DNA, 381 bp, ARTIFICIAL SEQUENCE
  Coding Sequence for Antibody Variable Heavy (VH) Chains
gaggtgcagctggtggagtctgggggaggcttggtccagcctggggggtccctgagactctcctgtgcagcctccggattcacctttagtagctattggatgagctgggtccgccaggctccagggaaggggctggagtgggtggccagcataaaacaagatggaagtgagaaatactatgtggactctgtgaagggccgattcaccatctccagagacaacgccaggaactcactgtatctgcaaatgaacagcctgagagccgaggacacggctgtgtattactgtgcgagagatcttgtattaatggtgtatgatatggactactactactacggtatggacgtctggggccaagggaccacggtcaccgtctcctca

SEQ ID NO: 441 - DNA, 354 bp, ARTIFICIAL SEQUENCE
  Coding Sequence for Antibody Variable Heavy (VH) Chains
caggttcagttggtgcagtctggagctgaagtgacgaagcctggggcctcagtgaaggtctcctgcaaggcttctggttacacctttaccagctatggtatcagctgggtgcgacaggcccctggacaagggcttgagtggatgggatggatcagcgtttataaaggtaacacaaactatgcacagaagctccagggcagagtcaccatgaccacagacacatccacgagcacagcctacatggagttgaggagcctgagatctgacgacacggccgtgtattactgtgcgagaaattaccaaattttttcatttgactactggggccagggaaccctggtcaccgtctcctca

SEQ ID NO: 442 - DNA, 342 bp, ARTIFICIAL SEQUENCE
  Coding Sequence for Antibody Variable Heavy (VH) Chains
caggtgcagctggtggagtctgggggaggcgtggtccagcctgggaggtccctgagactctcctgtgcagcgtctggattcaccttcagtagctatggcatgcactgggtccgccaggctccaggcaaggggctggagtgggtggcagttatatggtatgatggaagtaataaatactatgcagactccgtgaagggccgattcaccatctccagagacaattccaagaacacgctgtatctgcaaatgaacagcctgagagccgaggacacggctgtgtattactgtgtgagagatcggggactggactggggccagggaaccctggtcaccgtctcctca

SEQ ID NO: 443 - DNA, 348 bp, ARTIFICIAL SEQUENCE
  Coding Sequence for Antibody Variable Heavy (VH) Chains
caggtgcagctacagcagtggggcgcaggactgttgaagccttcggagaccctgtccctcacctgcgctgtctctggtgggtccttcagagcttactactggaactggatccgccagcccccagggaaggggctggagtggattggggagatcaatcatagtggaaggaccgactacaacccgtccctcaagagtcgagtcaccatatcagtagacacgtccaagaaccagttctccctgaagctgagctctgtgaccgccgcggacacggctgtgtattactgtgcgagagggcagctcgtcccctttgactactggggccagggaaccctggtcaccgtctcctca

SEQ ID NO: 444 - DNA, 345 bp, ARTIFICIAL SEQUENCE
  Coding Sequence for Antibody Variable Heavy (VH) Chains
cagattcagctggtgcagtctggagctgaggtgaagaagcctggggcctcagtgaaggtctcctgcaaggcttctggttacaccttgaccagctatggtatcagctgggtgcgacaggcccctggacaagggcttgagtggatgggatggatcagcttttacaatggtaacacaaactatgcacagaaggtccagggcagagtcaccatgaccacagacacatccacgagcacagtctacatggagctgaggagcctgagatctgacgacacggccgtgtatttctgtgcgagaggctacggtatggacgtctggggccaagggaccacggtcaccgtctcctca

SEQ ID NO: 445 - DNA, 345 bp, ARTIFICIAL SEQUENCE
  Coding Sequence for Antibody Variable Heavy (VH) Chains
caggttcaactggtgcagtctggagctgaggtgaagaagtctggggcctcagtgaaggtctcctgcaaggcttctggttacaccttgaccagctatggtatcagctgggtgcgacaggcccctggacaagggcttgagtggatgggatggatcagcgtttacaatggtaacacaaactatgcacagaaggtccagggcagagtcaccatgaccacagacacatccacgagcacagtctacatggaggtgaggagcctgagatctgacgacacggccgtttattattgtgcgagaggctacggtatggacgtctggggccaagggaccacggtcaccgtctcctca

SEQ ID NO: 446 - DNA, 369 bp, ARTIFICIAL SEQUENCE
  Coding Sequence for Antibody Variable Heavy (VH) Chains
gaggtgcagctggtggagtctgggggaggcctggtcaagcctggggggtccctgagactctcctgtgcagcctctggattcacccacagtagctatagcatgaactgggtccgccaggctccagggaaggggctggagtgggtctcatccattagtagtagtagtagttacatttcctacgcagactcagtgaagggccgattcaccatctccagagacaacgccaagaactcactgtatctgcaaatgaacagcctgagagccgaggacacggctgtgtatttctgtgcgagagattacgattttcacagtgcttactatgatgcttttgatgtctggggccaagggacaatggtcaccgtctcttca

SEQ ID NO: 447 - DNA, 369 bp, ARTIFICIAL SEQUENCE
  Coding Sequence for Antibody Variable Heavy (VH) Chains
gaggtgcagctggtggagtctgggggaggcctggtcaagcctggggggtccctgagactctcctgtgcagcctctggattcaccttcagtagccacagcatgaactgggtccgccaggctccagggaaggggctggagtgggtctcatccattagtagtagtagtagttacatttcctacgcagactcagtgaagggccgattcaccatctccagagacaacgccaagaactcactgtatctgcaaatgaacagcctgagagccgaggacacggctgtgtatttctgtgcgagagattacgattttcacagtgcttactatgatgcttttgatgtctggggccaagggacaatggtcaccgtctcttca

SEQ ID NO: 448 - DNA, 369 bp, ARTIFICIAL SEQUENCE
  Coding Sequence for Antibody Variable Heavy (VH) Chains
gaggtgcagctggtggagtctgggggaggcctggtcaagcctggggggtccctgagactctcctgtgcagcctctggattcaccttcagtagctatagcatgaactgggtccgccaggctccagggaaggggctggagtgggtctcatccattagtagtcacagtagttacatttcctacgcagactcagtgaagggccgattcaccatctccagagacaacgccaagaactcactgtatctgcaaatgaacagcctgagagccgaggacacggctgtgtatttctgtgcgagagattacgattttcacagtgcttactatgatgcttttgatgtctggggccaagggacaatggtcaccgtctcttca

SEQ ID NO: 449 - DNA, 369 bp, ARTIFICIAL SEQUENCE
  Coding Sequence for Antibody Variable Heavy (VH) Chains
gaggtgcagctggtggagtctgggggaggcctggtcaagcctggggggtccctgagactctcctgtgcagcctctggattcaccttcagtagctatagcatgaactgggtccgccaggctccagggaaggggctggagtgggtctcatccattagtagtagtagtagttacatttcctacgcagactcagtgaagggccgattcaccatctccagagacaacgccaagaactcactgtatctgcaaatgaacagcctgagagccgaggacacggctgtgtatttctgtgcgagagattacgattttcacagtgctcactatgatgcttttgatgtctggggccaagggacaatggtcaccgtctcttca

SEQ ID NO: 450 - DNA, 369 bp, ARTIFICIAL SEQUENCE; identical to SEQ ID NO: 446
  Coding Sequence for Antibody Variable Heavy (VH) Chains

SEQ ID NO: 451 - DNA, 369 bp, ARTIFICIAL SEQUENCE; identical to SEQ ID NO: 447
  Coding Sequence for Antibody Variable Heavy (VH) Chains

SEQ ID NO: 452 - DNA, 369 bp, ARTIFICIAL SEQUENCE; identical to SEQ ID NO: 449
  Coding Sequence for Antibody Variable Heavy (VH) Chains

SEQ ID NO: 453 - DNA, 369 bp, ARTIFICIAL SEQUENCE
  Coding Sequence for Antibody Variable Heavy (VH) Chains
gaggtgcagctggtggagtctgggggaggcctggtcaagcctggggggtccctgagactctcctgtgcagcctctggattcacccacagtagctatagcatgaactgggtccgccaggctccagggaaggggctggagtgggtctcatccattagtagtagtagtcactacatttcctacgcagactcagtgaagggccgattcaccatctccagagacaacgccaagaactcactgtatctgcaaatgaacagcctgagagccgaggacacggctgtgtatttctgtgcgagagattacgattttcacagtgcttactatgatgcttttgatgtctggggccaagggacaatggtcaccgtctcttca

SEQ ID NO: 454 - DNA, 369 bp, ARTIFICIAL SEQUENCE
  Coding Sequence for Antibody Variable Heavy (VH) Chains
gaggtgcagctggtggagtctgggggaggcctggtcaagcctggggggtccctgagactctcctgtgcagcctctggattcacccacagtagctatagcatgaactgggtccgccaggctccagggaaggggctggagtgggtctcatccattagtagtagtagtagttacatttcccacgcagactcagtgaagggccgattcaccatctccagagacaacgccaagaactcactgtatctgcaaatgaacagcctgagagccgaggacacggctgtgtatttctgtgcgagagattacgattttcacagtgcttactatgatgcttttgatgtctggggccaagggacaatggtcaccgtctcttca

SEQ ID NO: 455 - DNA, 369 bp, ARTIFICIAL SEQUENCE
  Coding Sequence for Antibody Variable Heavy (VH) Chains
gaggtgcagctggtggagtctgggggaggcctggtcaagcctggggggtccctgagactctcctgtgcagcctctggattcacccacagtagctatagcatgaactgggtccgccaggctccagggaaggggctggagtgggtctcatccattagtagtagtagtagttacatttcctacgcacactcagtgaagggccgattcaccatctccagagacaacgccaagaactcactgtatctgcaaatgaacagcctgagagccgaggacacggctgtgtatttctgtgcgagagattacgattttcacagtgcttactatgatgcttttgatgtctggggccaagggacaatggtcaccgtctcttca

SEQ ID NO: 456 - DNA, 369 bp, ARTIFICIAL SEQUENCE
  Coding Sequence for Antibody Variable Heavy (VH) Chains
gaggtgcagctggtggagtctgggggaggcctggtcaagcctggggggtccctgagactctcctgtgcagcctctggattcacccacagtagctatagcatgaactgggtccgccaggctccagggaaggggctggagtgggtctcatccattagtagtagtagtagttacatttcctacgcagaccacgtgaagggccgattcaccatctccagagacaacgccaagaactcactgtatctgcaaatgaacagcctgagagccgaggacacggctgtgtatttctgtgcgagagattacgattttcacagtgcttactatgatgcttttgatgtctggggccaagggacaatggtcaccgtctcttca

SEQ ID NO: 457 - DNA, 369 bp, ARTIFICIAL SEQUENCE
  Coding Sequence for Antibody Variable Heavy (VH) Chains
gaggtgcagctggtggagtctgggggaggcctggtcaagcctggggggtccctgagactctcctgtgcagcctctggattcacccacagtagctatagcatgaactgggtccgccaggctccagggaaggggctggagtgggtctcatccattagtagtagtagtagttacatttcctacgcagactcagtgaagggccgattcaccatctccagagacaacgccaagaactcactgtatctgcaaatgaacagcctgagagccgaggacacggctgtgtatttctgtgcgagagattacgattttcacagtgctcactatgatgcttttgatgtctggggccaagggacaatggtcaccgtctcttca

SEQ ID NO: 458 - DNA, 369 bp, ARTIFICIAL SEQUENCE
  Coding Sequence for Antibody Variable Heavy (VH) Chains
gaggtgcagctggtggagtctgggggaggcctggtcaagcctggggggtccctgagactctcctgtgcagcctctggattcaccttcagtagccacagcatgaactgggtccgccaggctccagggaaggggctggagtgggtctcatccattagtagtcacagtagttacatttcctacgcagactcagtgaagggccgattcaccatctccagagacaacgccaagaactcactgtatctgcaaatgaacagcctgagagccgaggacacggctgtgtatttctgtgcgagagattacgattttcacagtgcttactatgatgcttttgatgtctggggccaagggacaatggtcaccgtctcttca

SEQ ID NO: 459 - DNA, 369 bp, ARTIFICIAL SEQUENCE
  Coding Sequence for Antibody Variable Heavy (VH) Chains
gaggtgcagctggtggagtctgggggaggcctggtcaagcctggggggtccctgagactctcctgtgcagcctctggattcaccttcagtagccacagcatgaactgggtccgccaggctccagggaaggggctggagtgggtctcatccattagtagtagtagtagttacatttcctacgcacactcagtgaagggccgattcaccatctccagagacaacgccaagaactcactgtatctgcaaatgaacagcctgagagccgaggacacggctgtgtatttctgtgcgagagattacgattttcacagtgcttactatgatgcttttgatgtctggggccaagggacaatggtcaccgtctcttca

SEQ ID NO: 460 - DNA, 369 bp, ARTIFICIAL SEQUENCE
  Coding Sequence for Antibody Variable Heavy (VH) Chains
gaggtgcagctggtggagtctgggggaggcctggtcaagcctggggggtccctgagactctcctgtgcagcctctggattcaccttcagtagccacagcatgaactgggtccgccaggctccagggaaggggctggagtgggtctcatccattagtagtagtagtagttacatttcctacgcagaccacgtgaagggccgattcaccatctccagagacaacgccaagaactcactgtatctgcaaatgaacagcctgagagccgaggacacggctgtgtatttctgtgcgagagattacgattttcacagtgcttactatgatgcttttgatgtctggggccaagggacaatggtcaccgtctcttca

SEQ ID NO: 461 - DNA, 369 bp, ARTIFICIAL SEQUENCE
  Coding Sequence for Antibody Variable Heavy (VH) Chains
gaggtgcagctggtggagtctgggggaggcctggtcaagcctggggggtccctgagactctcctgtgcagcctctggattcaccttcagtagccacagcatgaactgggtccgccaggctccagggaaggggctggagtgggtctcatccattagtagtagtagtagttacatttcctacgcagactcagtgaagggccgattcaccatctccagagacaacgccaagaactcactgtatctgcaaatgaacagcctgagagccgaggacacggctgtgtatttctgtgcgagagattacgattttcacagtgctcactatgatgcttttgatgtctggggccaagggacaatggtcaccgtctcttca

SEQ ID NO: 462 - DNA, 369 bp, ARTIFICIAL SEQUENCE
  Coding Sequence for Antibody Variable Heavy (VH) Chains
gaggtgcagctggtggagtctgggggaggcctggtcaagcctggggggtccctgagactctcctgtgcagcctctggattcaccttcagtagctatagcatgaactgggtccgccaggctccagggaaggggctggagtgggtctcatccattagtagtcacagtagttaccactcctacgcagactcagtgaagggccgattcaccatctccagagacaacgccaagaactcactgtatctgcaaatgaacagcctgagagccgaggacacggctgtgtatttctgtgcgagagattacgattttcacagtgcttactatgatgcttttgatgtctggggccaagggacaatggtcaccgtctcttca

SEQ ID NO: 463 - DNA, 369 bp, ARTIFICIAL SEQUENCE
  Coding Sequence for Antibody Variable Heavy (VH) Chains
gaggtgcagctggtggagtctgggggaggcctggtcaagcctggggggtccctgagactctcctgtgcagcctctggattcaccttcagtagctatagcatgaactgggtccgccaggctccagggaaggggctggagtgggtctcatccattagtagtcacagtagttacatttcctacgcagactcagtgaagggccgattcaccatctccagagacaacgccaagaactcactgtatctgcaaatgaacagcctgagagccgaggacacggctgtgtatttctgtgcgagagattacgattttcacagtgctcactatgatgcttttgatgtctggggccaagggacaatggtcaccgtctcttca

SEQ ID NO: 464 - DNA, 369 bp, ARTIFICIAL SEQUENCE
  Coding Sequence for Antibody Variable Heavy (VH) Chains
gaggtgcagctggtggagtctgggggaggcctggtcaagcctggggggtccctgagactctcctgtgcagcctctggattcaccttcagtagctatagcatgaactgggtccgccaggctccagggaaggggctggagtgggtctcatccattagtagtagtagtcactaccactcctacgcagactcagtgaagggccgattcaccatctccagagacaacgccaagaactcactgtatctgcaaatgaacagcctgagagccgaggacacggctgtgtatttctgtgcgagagattacgattttcacagtgcttactatgatgcttttgatgtctggggccaagggacaatggtcaccgtctcttca

SEQ ID NO: 465 - DNA, 369 bp, ARTIFICIAL SEQUENCE
  Coding Sequence for Antibody Variable Heavy (VH) Chains
gaggtgcagctggtggagtctgggggaggcctggtcaagcctggggggtccctgagactctcctgtgcagcctctggattcaccttcagtagctatagcatgaactgggtccgccaggctccagggaaggggctggagtgggtctcatccattagtagtagtagtcactacatttcccacgcagactcagtgaagggccgattcaccatctccagagacaacgccaagaactcactgtatctgcaaatgaacagcctgagagccgaggacacggctgtgtatttctgtgcgagagattacgattttcacagtgcttactatgatgcttttgatgtctggggccaagggacaatggtcaccgtctcttca

SEQ ID NO: 466 - DNA, 369 bp, ARTIFICIAL SEQUENCE
  Coding Sequence for Antibody Variable Heavy (VH) Chains
gaggtgcagctggtggagtctgggggaggcctggtcaagcctggggggtccctgagactctcctgtgcagcctctggattcaccttcagtagctatagcatgaactgggtccgccaggctccagggaaggggctggagtgggtctcatccattagtagtagtagtcactacatttcctacgcagaccacgtgaagggccgattcaccatctccagagacaacgccaagaactcactgtatctgcaaatgaacagcctgagagccgaggacacggctgtgtatttctgtgcgagagattacgattttcacagtgcttactatgatgcttttgatgtctggggccaagggacaatggtcaccgtctcttca

SEQ ID NO: 467 - DNA, 369 bp, ARTIFICIAL SEQUENCE
  Coding Sequence for Antibody Variable Heavy (VH) Chains
gaggtgcagctggtggagtctgggggaggcctggtcaagcctggggggtccctgagactctcctgtgcagcctctggattcaccttcagtagctatagcatgaactgggtccgccaggctccagggaaggggctggagtgggtctcatccattagtagtagtagtagttaccactcctacgcagactcagtgaagggccgattcaccatctccagagacaacgccaagaactcactgtatctgcaaatgaacagcctgagagccgaggacacggctgtgtatttctgtgcgagagattacgattttcacagtgctcactatgatgcttttgatgtctggggccaagggacaatggtcaccgtctcttca

SEQ ID NO: 468 - DNA, 369 bp, ARTIFICIAL SEQUENCE
  Coding Sequence for Antibody Variable Heavy (VH) Chains
gaggtgcagctggtggagtctgggggaggcctggtcaagcctggggggtccctgagactctcctgtgcagcctctggattcaccttcagtagctatagcatgaactgggtccgccaggctccagggaaggggctggagtgggtctcatccattagtagtagtagtagttaccactcctacgcagactcagtgaagggccgattcaccatctccagagacaacgccaagaactcactgtatctgcaaatgaacagcctgagagccgaggacacggctgtgtatttctgtgcgagagattacgattttcacagtgcttaccacgatgcttttgatgtctggggccaagggacaatggtcaccgtctcttca

SEQ ID NO: 469 - DNA, 369 bp, ARTIFICIAL SEQUENCE
  Coding Sequence for Antibody Variable Heavy (VH) Chains
gaggtgcagctggtggagtctgggggaggcctggtcaagcctggggggtccctgagactctcctgtgcagcctctggattcaccttcagtagctatagcatgaactgggtccgccaggctccagggaaggggctggagtgggtctcatccattagtagtagtagtagttacatttcccacgcagactcagtgaagggccgattcaccatctccagagacaacgccaagaactcactgtatctgcaaatgaacagcctgagagccgaggacacggctgtgtatttctgtgcgagagattacgattttcacagtgctcactatgatgcttttgatgtctggggccaagggacaatggtcaccgtctcttca

SEQ ID NO: 470 - DNA, 369 bp, ARTIFICIAL SEQUENCE
  Coding Sequence for Antibody Variable Heavy (VH) Chains
gaggtgcagctggtggagtctgggggaggcctggtcaagcctggggggtccctgagactctcctgtgcagcctctggattcaccttcagtagctatagcatgaactgggtccgccaggctccagggaaggggctggagtgggtctcatccattagtagtagtagtagttacatttcctacgcacactcagtgaagggccgattcaccatctccagagacaacgccaagaactcactgtatctgcaaatgaacagcctgagagccgaggacacggctgtgtatttctgtgcgagagattacgattttcacagtgctcactatgatgcttttgatgtctggggccaagggacaatggtcaccgtctcttca

SEQ ID NO: 471 - DNA, 369 bp, ARTIFICIAL SEQUENCE
  Coding Sequence for Antibody Variable Heavy (VH) Chains
gaggtgcagctggtggagtctgggggaggcctggtcaagcctggggggtccctgagactctcctgtgcagcctctggattcaccttcagtagctatagcatgaactgggtccgccaggctccagggaaggggctggagtgggtctcatccattagtagtagtagtagttacatttcctacgcacactcagtgaagggccgattcaccatctccagagacaacgccaagaactcactgtatctgcaaatgaacagcctgagagccgaggacacggctgtgtatttctgtgcgagagattacgattttcacagtgcttaccacgatgcttttgatgtctggggccaagggacaatggtcaccgtctcttca

SEQ ID NO: 472 - DNA, 369 bp, ARTIFICIAL SEQUENCE
  Coding Sequence for Antibody Variable Heavy (VH) Chains
gaggtgcagctggtggagtctgggggaggcctggtcaagcctggggggtccctgagactctcctgtgcagcctctggattcaccttcagtagctatagcatgaactgggtccgccaggctccagggaaggggctggagtgggtctcatccattagtagtagtagtagttacatttcctacgcagaccacgtgaagggccgattcaccatctccagagacaacgccaagaactcactgtatctgcaaatgaacagcctgagagccgaggacacggctgtgtatttctgtgcgagagattacgattttcacagtgctcactatgatgcttttgatgtctggggccaagggacaatggtcaccgtctcttca

SEQ ID NO: 473 - DNA, 381 bp, ARTIFICIAL SEQUENCE; identical to SEQ ID NO: 438
  Coding Sequence for Antibody Variable Heavy (VH) Chains

SEQ ID NO: 474 - DNA, 381 bp, ARTIFICIAL SEQUENCE; identical to SEQ ID NO: 438
  Coding Sequence for Antibody Variable Heavy (VH) Chains

SEQ ID NO: 475 - DNA, 381 bp, ARTIFICIAL SEQUENCE; identical to SEQ ID NO: 438
  Coding Sequence for Antibody Variable Heavy (VH) Chains

SEQ ID NO: 476 - DNA, 381 bp, ARTIFICIAL SEQUENCE; identical to SEQ ID NO: 440
  Coding Sequence for Antibody Variable Heavy (VH) Chains

SEQ ID NO: 477 - DNA, 381 bp, ARTIFICIAL SEQUENCE; identical to SEQ ID NO: 440
  Coding Sequence for Antibody Variable Heavy (VH) Chains

SEQ ID NO: 478 - DNA, 381 bp, ARTIFICIAL SEQUENCE; identical to SEQ ID NO: 440
  Coding Sequence for Antibody Variable Heavy (VH) Chains

SEQ ID NO: 479 - DNA, 381 bp, ARTIFICIAL SEQUENCE; identical to SEQ ID NO: 440
  Coding Sequence for Antibody Variable Heavy (VH) Chains

SEQ ID NO: 480 - DNA, 381 bp, ARTIFICIAL SEQUENCE
  Coding Sequence for Antibody Variable Heavy (VH) Chains
gaggtgcagctggtggagtctgggggaggcttggtccagcctggggggtccctgagactctcctgtgcagcctccggattcacctttagtagctattggatgagctgggtccgccaggctccagggaaggggctggagtgggtggccagcataaaacaagatggaagtgagaaatactatgtggactctgtgaagggccgattcaccatctccagagacaacgccaggaactcactgtatctgcaaatgaacagcctgagagccgaggacacggctgtgtattactgtgcgagagatcttgtattattcgtgtatgacatggactactactactacggtatggacgtctggggccaagggaccacggtcaccgtctcctca

SEQ ID NO: 481 - DNA, 381 bp, ARTIFICIAL SEQUENCE; identical to SEQ ID NO: 480
  Coding Sequence for Antibody Variable Heavy (VH) Chains

SEQ ID NO: 482 - DNA, 381 bp, ARTIFICIAL SEQUENCE; identical to SEQ ID NO: 480
  Coding Sequence for Antibody Variable Heavy (VH) Chains

SEQ ID NO: 483 - DNA, 381 bp, ARTIFICIAL SEQUENCE; identical to SEQ ID NO: 480
  Coding Sequence for Antibody Variable Heavy (VH) Chains

SEQ ID NO: 484 - DNA, 381 bp, ARTIFICIAL SEQUENCE; identical to SEQ ID NO: 480
  Coding Sequence for Antibody Variable Heavy (VH) Chains

SEQ ID NO: 485 - DNA, 381 bp, ARTIFICIAL SEQUENCE; identical to SEQ ID NO: 480
  Coding Sequence for Antibody Variable Heavy (VH) Chains

SEQ ID NO: 486 - DNA, 381 bp, ARTIFICIAL SEQUENCE
  Coding Sequence for Antibody Variable Heavy (VH) Chains
gaggtgcagctggtggagtctgggggaggcttggtccagcctggggggtccctgagactctcctgtgcagcctccggattcacctttagtagctattggatgagctgggtccgccaggctccagggaaggggctggagtgggtggccagcataaaacaagatggaagtgagaaatactatgtggactctgtgaagggccgattcaccatctccagagacaacgccaggaactcactgtatctgcaaatgaacagcctgagagccgaggacacggctgtgtattactgtgcgagagatcttgtattatcggtgtatgacatggactactactactacggtatggacgtctggggccaagggaccacggtcaccgtctcctca

SEQ ID NO: 487 - DNA, 381 bp, ARTIFICIAL SEQUENCE; identical to SEQ ID NO: 486
  Coding Sequence for Antibody Variable Heavy (VH) Chains

SEQ ID NO: 488 - DNA, 381 bp, ARTIFICIAL SEQUENCE; identical to SEQ ID NO: 486
  Coding Sequence for Antibody Variable Heavy (VH) Chains

SEQ ID NO: 489 - DNA, 381 bp, ARTIFICIAL SEQUENCE; identical to SEQ ID NO: 486
  Coding Sequence for Antibody Variable Heavy (VH) Chains

SEQ ID NO: 490 - DNA, 381 bp, ARTIFICIAL SEQUENCE; identical to SEQ ID NO: 486
  Coding Sequence for Antibody Variable Heavy (VH) Chains

SEQ ID NO: 491 - DNA, 381 bp, ARTIFICIAL SEQUENCE; identical to SEQ ID NO: 486
  Coding Sequence for Antibody Variable Heavy (VH) Chains

SEQ ID NO: 492 - DNA, 381 bp, ARTIFICIAL SEQUENCE; identical to SEQ ID NO: 486
  Coding Sequence for Antibody Variable Heavy (VH) Chains

SEQ ID NO: 493 - DNA, 381 bp, ARTIFICIAL SEQUENCE; identical to SEQ ID NO: 486
  Coding Sequence for Antibody Variable Heavy (VH) Chains

SEQ ID NO: 494 - DNA, 381 bp, ARTIFICIAL SEQUENCE; identical to SEQ ID NO: 480
  Coding Sequence for Antibody Variable Heavy (VH) Chains

SEQ ID NO: 495 - DNA, 381 bp, ARTIFICIAL SEQUENCE; identical to SEQ ID NO: 438
  Coding Sequence for Antibody Variable Heavy (VH) Chains

SEQ ID NO: 496 - DNA, 381 bp, ARTIFICIAL SEQUENCE; identical to SEQ ID NO: 440
  Coding Sequence for Antibody Variable Heavy (VH) Chains

SEQ ID NO: 497 - DNA, 381 bp, ARTIFICIAL SEQUENCE; identical to SEQ ID NO: 440
  Coding Sequence for Antibody Variable Heavy (VH) Chains

SEQ ID NO: 498 - DNA, 381 bp, ARTIFICIAL SEQUENCE; identical to SEQ ID NO: 440
  Coding Sequence for Antibody Variable Heavy (VH) Chains

SEQ ID NO: 499 - DNA, 381 bp, ARTIFICIAL SEQUENCE; identical to SEQ ID NO: 440
  Coding Sequence for Antibody Variable Heavy (VH) Chains

SEQ ID NO: 500 - DNA, 381 bp, ARTIFICIAL SEQUENCE; identical to SEQ ID NO: 486
  Coding Sequence for Antibody Variable Heavy (VH) Chains

SEQ ID NO: 501 - DNA, 381 bp, ARTIFICIAL SEQUENCE; identical to SEQ ID NO: 480
  Coding Sequence for Antibody Variable Heavy (VH) Chains

SEQ ID NO: 502 - DNA, 381 bp, ARTIFICIAL SEQUENCE; identical to SEQ ID NO: 440
  Coding Sequence for Antibody Variable Heavy (VH) Chains

SEQ ID NO: 503 - DNA, 381 bp, ARTIFICIAL SEQUENCE; identical to SEQ ID NO: 480
  Coding Sequence for Antibody Variable Heavy (VH) Chains

SEQ ID NO: 504 - DNA, 381 bp, ARTIFICIAL SEQUENCE; identical to SEQ ID NO: 440
  Coding Sequence for Antibody Variable Heavy (VH) Chains

SEQ ID NO: 505 - DNA, 381 bp, ARTIFICIAL SEQUENCE; identical to SEQ ID NO: 486
  Coding Sequence for Antibody Variable Heavy (VH) Chains

SEQ ID NO: 506 - protein, 241 aa, ARTIFICIAL SEQUENCE; identical to SEQ ID NO: 49
  Coding Sequence for Antibody Variable Heavy (VH) Chains

SEQ ID NO: 507 - protein, 241 aa, ARTIFICIAL SEQUENCE; identical to SEQ ID NO: 44
  Coding Sequence for Antibody Variable Heavy (VH) Chains

SEQ ID NO: 508 - DNA, 381 bp, ARTIFICIAL SEQUENCE
  Coding Sequence for Antibody Variable Heavy (VH) Chains
gaggtgcagctggtggagtctgggggaggcttggtccagcctggggggtccctgagactctcctgtgcagcctccggattcacctttagtagctattggatgagctgggtccgccaggctccagggaaggggctggagtgggtggccagcataaaacaagatggaagtgagaaatactatgtggactctgtgaagggccgattcaccatctccagagacaacgccaggaactcactgtatctgcaaatgaacagcctgagagccgaggacacggctgtgtattactgtgcgagagatcttgtattaaacgtgtatgacatggactactactactacggtatggacgtctggggccaagggaccacggtcaccgtctcctca

SEQ ID NO: 509 - DNA, 381 bp, ARTIFICIAL SEQUENCE; identical to SEQ ID NO: 438
  Coding Sequence for Antibody Variable Heavy (VH) Chains

SEQ ID NO: 510 - DNA, 381 bp, ARTIFICIAL SEQUENCE; identical to SEQ ID NO: 508
  Coding Sequence for Antibody Variable Heavy (VH) Chains

SEQ ID NO: 511 - DNA, 381 bp, ARTIFICIAL SEQUENCE; identical to SEQ ID NO: 438
  Coding Sequence for Antibody Variable Heavy (VH) Chains

SEQ ID NO: 512 - DNA, 381 bp, ARTIFICIAL SEQUENCE; identical to SEQ ID NO: 486
  Coding Sequence for Antibody Variable Heavy (VH) Chains

SEQ ID NO: 513 - DNA, 381 bp, ARTIFICIAL SEQUENCE; identical to SEQ ID NO: 508
  Coding Sequence for Antibody Variable Heavy (VH) Chains

SEQ ID NO: 514 - DNA, 366 bp, ARTIFICIAL SEQUENCE
  Coding Sequence for Antibody Variable Heavy (VH) Chains
gaggtgcacctggtggagtctgggggaggcgtggtccagcctgggaggtccctgagactctcctgtgcagcgtctggattcaccttcaacagctttggcatgcactgggtccgccaggctccaggcaaggggctggagtgggtggcacttatctggtctgatggaagtgatgaatactatgcagactccgtgaagggccgattcaccatctccagagacaattccaagaacacgctgtatctgcaaatgaacagcctgagagccgaggacacggctgtgtattactgtgcgagagccatagcagccctctactactactacggtatggacgtctggggccaagggaccacggtcaccgtctcctca

SEQ ID NO: 515 - DNA, 363 bp, ARTIFICIAL SEQUENCE
  Coding Sequence for Antibody Variable Heavy (VH) Chains
gaggtgcagctgttggagtctgggggaggcttggtacagccaggtggatccctgagactctcctgtgcagcctctggattcacctttagcagctatgccatgaactgggtccgccaggctccagggaaggggctggagtgggtctcaactattagtggtagtggtggtaacacatactacgcagactccgtgaagggccggttcaccatctccagagacaattccaagaacacgctgtatctgcaaatgaacagcctgagagccgaggacacggccgtatattactgtgcgaaaaagtttgtactaatggtgtatgctatgcttgactactggggccagggaaccctggtcaccgtctcctca

SEQ ID NO: 516 - DNA, 381 bp, ARTIFICIAL SEQUENCE; identical to SEQ ID NO: 438
  Coding Sequence for Antibody Variable Heavy (VH) Chains

SEQ ID NO: 517 - DNA, 381 bp, ARTIFICIAL SEQUENCE
  Coding Sequence for Antibody Variable Heavy (VH) Chains
gaggtgcagctggtggagtctgggggaggcttggtccagcctggggggtccctgagactctcctgtgcagcctccggattcacctttagtagctattggatgagctgggtccgccaggctccagggaaggggctggagtgggtggccagcataaaacaagatggaagtgagaaatactatgtggactctgtgaagggccgattcaccatctccagagacaacgccaggaactcactgtatctgcaaatgaacagcctgagagccgaggacacggctgtgtattactgtgcgagagatcttgtattaatggtgtatgatctggactactactactacggtatggacgtctggggccaagggaccacggtcaccgtctcctca

SEQ ID NO: 518 - DNA, 381 bp, ARTIFICIAL SEQUENCE; identical to SEQ ID NO: 440
  Coding Sequence for Antibody Variable Heavy (VH) Chains

SEQ ID NO: 519 - DNA, 381 bp, ARTIFICIAL SEQUENCE; identical to SEQ ID NO: 440
  Coding Sequence for Antibody Variable Heavy (VH) Chains

SEQ ID NO: 520 - DNA, 381 bp, ARTIFICIAL SEQUENCE; identical to SEQ ID NO: 440
  Coding Sequence for Antibody Variable Heavy (VH) Chains

SEQ ID NO: 521 - DNA, 381 bp, ARTIFICIAL SEQUENCE; identical to SEQ ID NO: 440
  Coding Sequence for Antibody Variable Heavy (VH) Chains

SEQ ID NO: 522 - protein, 5 aa, ARTIFICIAL SEQUENCE
  Exemplary CDRH Sequences - CDRH1
SYWMS

SEQ ID NO: 523 - protein, 17 aa, ARTIFICIAL SEQUENCE
  Exemplary CDRH Sequences - CDRH2
SIKQDGSEKYYVDSVKG

SEQ ID NO: 524 - protein, 18 aa, ARTIFICIAL SEQUENCE
  Exemplary CDRH Sequences - CDRH3
DLVLMVYDIDYYYYGMDV

SEQ ID NO: 525 - protein, 5 aa, ARTIFICIAL SEQUENCE
  Exemplary CDRH Sequences - CDRH1
SYWMS

SEQ ID NO: 526 - protein, 17 aa, ARTIFICIAL SEQUENCE
  Exemplary CDRH Sequences - CDRH2
SIKQDGSEKYYVDSVKG

SEQ ID NO: 527 - protein, 18 aa, ARTIFICIAL SEQUENCE
  Exemplary CDRH Sequences - CDRH3
DLVLMVYDIDYYYYGMDV

SEQ ID NO: 528 - protein, 5 aa, ARTIFICIAL SEQUENCE
  Exemplary CDRH Sequences - CDRH1
SYWMS

SEQ ID NO: 529 - protein, 17 aa, ARTIFICIAL SEQUENCE
  Exemplary CDRH Sequences - CDRH2
SIKQDGSEKYYVDSVKG

SEQ ID NO: 530 - protein, 18 aa, ARTIFICIAL SEQUENCE
  Exemplary CDRH Sequences - CDRH3
DLVLMVYDMDYYYYGMDV

SEQ ID NO: 531 - protein, 5 aa, ARTIFICIAL SEQUENCE
  Exemplary CDRH Sequences - CDRH1
SYGIS

SEQ ID NO: 532 - protein, 17 aa, ARTIFICIAL SEQUENCE
  Exemplary CDRH Sequences - CDRH2
WISVYKGNTNYAQKLQG

SEQ ID NO: 533 - protein, 9 aa, ARTIFICIAL SEQUENCE
  Exemplary CDRH Sequences - CDRH3
NYQIFSFDY

SEQ ID NO: 534 - protein, 5 aa, ARTIFICIAL SEQUENCE
  Exemplary CDRH Sequences - CDRH1
SYGMH

SEQ ID NO: 535 - protein, 17 aa, ARTIFICIAL SEQUENCE
  Exemplary CDRH Sequences - CDRH2
WISVYKGNTNYAQKLQG

SEQ ID NO: 536 - protein, 5 aa, ARTIFICIAL SEQUENCE
  Exemplary CDRH Sequences - CDRH3
DRGLD

SEQ ID NO: 537 - protein, 5 aa, ARTIFICIAL SEQUENCE
  Exemplary CDRH Sequences - CDRH1
AYYWN

SEQ ID NO: 538 - protein, 16 aa, ARTIFICIAL SEQUENCE
  Exemplary CDRH Sequences - CDRH2
EINHSGRTDYNPSLKS

SEQ ID NO: 539 - protein, 8 aa, ARTIFICIAL SEQUENCE
  Exemplary CDRH Sequences - CDRH3
GQLVPFDY

SEQ ID NO: 540 - protein, 5 aa, ARTIFICIAL SEQUENCE
  Exemplary CDRH Sequences - CDRH1
SYGIS

SEQ ID NO: 541 - protein, 17 aa, ARTIFICIAL SEQUENCE
  Exemplary CDRH Sequences - CDRH2
WISFYNGNTNYAQKVQG

SEQ ID NO: 542 - protein, 6 aa, ARTIFICIAL SEQUENCE
  Exemplary CDRH Sequences - CDRH3
GYGMDV

SEQ ID NO: 543 - protein, 5 aa, ARTIFICIAL SEQUENCE
  Exemplary CDRH Sequences - CDRH1
SYGIS

SEQ ID NO: 544 - protein, 17 aa, ARTIFICIAL SEQUENCE
  Exemplary CDRH Sequences - CDRH2
WISVYNGNTNYAQKVQG

SEQ ID NO: 545 - protein, 6 aa, ARTIFICIAL SEQUENCE
  Exemplary CDRH Sequences - CDRH3
GYGMDV

SEQ ID NO: 546 - protein, 5 aa, ARTIFICIAL SEQUENCE
  Exemplary CDRH Sequences - CDRH1
SYSMN

SEQ ID NO: 547 - protein, 17 aa, ARTIFICIAL SEQUENCE
  Exemplary CDRH Sequences - CDRH2
SISSSSSYISYADSVKG

SEQ ID NO: 548 - protein, 14 aa, ARTIFICIAL SEQUENCE
  Exemplary CDRH Sequences - CDRH3
DYDFHSAYYDAFDV

SEQ ID NO: 549 - protein, 5 aa, ARTIFICIAL SEQUENCE
  Exemplary CDRH Sequences - CDRH1
SHSMN

SEQ ID NO: 550 - protein, 17 aa, ARTIFICIAL SEQUENCE
  Exemplary CDRH Sequences - CDRH2
SISSSSSYISYADSVKG

SEQ ID NO: 551 - protein, 14 aa, ARTIFICIAL SEQUENCE
  Exemplary CDRH Sequences - CDRH3
DYDFHSAYYDAFDV

SEQ ID NO: 552 - protein, 5 aa, ARTIFICIAL SEQUENCE
  Exemplary CDRH Sequences - CDRH1
SYSMN

SEQ ID NO: 553 - protein, 17 aa, ARTIFICIAL SEQUENCE
  Exemplary CDRH Sequences - CDRH2
SISSHSSYISYADSVKG

SEQ ID NO: 554 - protein, 14 aa, ARTIFICIAL SEQUENCE
  Exemplary CDRH Sequences - CDRH3
DYDFHSAYYDAFDV

SEQ ID NO: 555 - protein, 5 aa, ARTIFICIAL SEQUENCE
  Exemplary CDRH Sequences - CDRH1
SYSMN

SEQ ID NO: 556 - protein, 17 aa, ARTIFICIAL SEQUENCE
  Exemplary CDRH Sequences - CDRH2
SISSSSSYISYADSVKG

SEQ ID NO: 557 - protein, 14 aa, ARTIFICIAL SEQUENCE
  Exemplary CDRH Sequences - CDRH3
DYDFHSAHYDAFDV

SEQ ID NO: 558 - protein, 5 aa, ARTIFICIAL SEQUENCE
  Exemplary CDRH Sequences - CDRH1
SYSMN

SEQ ID NO: 559 - protein, 17 aa, ARTIFICIAL SEQUENCE
  Exemplary CDRH Sequences - CDRH2
SISSSSSYISYADSVKG

SEQ ID NO: 560 - protein, 14 aa, ARTIFICIAL SEQUENCE
  Exemplary CDRH Sequences - CDRH3
DYDFHSAYYDAFDV

SEQ ID NO: 561 - protein, 5 aa, ARTIFICIAL SEQUENCE
  Exemplary CDRH Sequences - CDRH1
SHSMN

SEQ ID NO: 562 - protein, 17 aa, ARTIFICIAL SEQUENCE
  Exemplary CDRH Sequences - CDRH2
SISSSSSYISYADSVKG

SEQ ID NO: 563 - protein, 14 aa, ARTIFICIAL SEQUENCE
  Exemplary CDRH Sequences - CDRH3
DYDFHSAYYDAFDV

SEQ ID NO: 564 - protein, 5 aa, ARTIFICIAL SEQUENCE
  Exemplary CDRH Sequences - CDRH1
SYSMN

SEQ ID NO: 565 - protein, 17 aa, ARTIFICIAL SEQUENCE
  Exemplary CDRH Sequences - CDRH2
SISSSSSYISYADSVKG

SEQ ID NO: 566 - protein, 14 aa, ARTIFICIAL SEQUENCE
  Exemplary CDRH Sequences - CDRH3
DYDFHSAHYDAFDV

SEQ ID NO: 567 - protein, 5 aa, ARTIFICIAL SEQUENCE
  Exemplary CDRH Sequences - CDRH1
SYSMN

SEQ ID NO: 568 - protein, 17 aa, ARTIFICIAL SEQUENCE
  Exemplary CDRH Sequences - CDRH2
SISSSSHYISYADSVKG

SEQ ID NO: 569 - protein, 14 aa, ARTIFICIAL SEQUENCE
  Exemplary CDRH Sequences - CDRH3
DYDFHSAYYDAFDV

SEQ ID NO: 570 - protein, 5 aa, ARTIFICIAL SEQUENCE
  Exemplary CDRH Sequences - CDRH1
SYSMN

SEQ ID NO: 571 - protein, 17 aa, ARTIFICIAL SEQUENCE
  Exemplary CDRH Sequences - CDRH2
SISSSSSYISHADSVKG

SEQ ID NO: 572 - protein, 14 aa, ARTIFICIAL SEQUENCE
  Exemplary CDRH Sequences - CDRH3
DYDFHSAYYDAFDV

SEQ ID NO: 573 - protein, 5 aa, ARTIFICIAL SEQUENCE
  Exemplary CDRH Sequences - CDRH1
SYSMN

SEQ ID NO: 574 - protein, 17 aa, ARTIFICIAL SEQUENCE
  Exemplary CDRH Sequences - CDRH2
SISSSSSYISYAHSVKG

SEQ ID NO: 575 - protein, 14 aa, ARTIFICIAL SEQUENCE
  Exemplary CDRH Sequences - CDRH3
DYDFHSAYYDAFDV

SEQ ID NO: 576 - protein, 5 aa, ARTIFICIAL SEQUENCE
  Exemplary CDRH Sequences - CDRH1
SYSMN

SEQ ID NO: 577 - protein, 17 aa, ARTIFICIAL SEQUENCE
  Exemplary CDRH Sequences - CDRH2
SISSSSSYISYADHVKG

SEQ ID NO: 578 - protein, 14 aa, ARTIFICIAL SEQUENCE
  Exemplary CDRH Sequences - CDRH3
DYDFHSAYYDAFDV

SEQ ID NO: 579 - protein, 5 aa, ARTIFICIAL SEQUENCE
  Exemplary CDRH Sequences - CDRH1
SYSMN

SEQ ID NO: 580 - protein, 17 aa, ARTIFICIAL SEQUENCE
  Exemplary CDRH Sequences - CDRH2
SISSSSSYISYADSVKG

SEQ ID NO: 581 - protein, 14 aa, ARTIFICIAL SEQUENCE
  Exemplary CDRH Sequences - CDRH3
DYDFHSAHYDAFDV

SEQ ID NO: 582 - protein, 5 aa, ARTIFICIAL SEQUENCE
  Exemplary CDRH Sequences - CDRH1
SHSMN

SEQ ID NO: 583 - protein, 17 aa, ARTIFICIAL SEQUENCE
  Exemplary CDRH Sequences - CDRH2
SISSHSSYISYADSVKG

SEQ ID NO: 584 - protein, 14 aa, ARTIFICIAL SEQUENCE
  Exemplary CDRH Sequences - CDRH3
DYDFHSAYYDAFDV

SEQ ID NO: 585 - protein, 5 aa, ARTIFICIAL SEQUENCE
  Exemplary CDRH Sequences - CDRH1
SHSMN

SEQ ID NO: 586 - protein, 17 aa, ARTIFICIAL SEQUENCE
  Exemplary CDRH Sequences - CDRH2
SISSSSSYISYAHSVKG

SEQ ID NO: 587 - protein, 14 aa, ARTIFICIAL SEQUENCE
  Exemplary CDRH Sequences - CDRH3
DYDFHSAYYDAFDV

SEQ ID NO: 588 - protein, 5 aa, ARTIFICIAL SEQUENCE
  Exemplary CDRH Sequences - CDRH1
SHSMN

SEQ ID NO: 589 - protein, 17 aa, ARTIFICIAL SEQUENCE
  Exemplary CDRH Sequences - CDRH2
SISSSSSYISYADHVKG

SEQ ID NO: 590 - protein, 14 aa, ARTIFICIAL SEQUENCE
  Exemplary CDRH Sequences - CDRH3
DYDFHSAYYDAFDV

SEQ ID NO: 591 - protein, 5 aa, ARTIFICIAL SEQUENCE
  Exemplary CDRH Sequences - CDRH1
SHSMN

SEQ ID NO: 592 - protein, 17 aa, ARTIFICIAL SEQUENCE
  Exemplary CDRH Sequences - CDRH2
SISSSSSYISYADSVKG

SEQ ID NO: 593 - protein, 14 aa, ARTIFICIAL SEQUENCE
  Exemplary CDRH Sequences - CDRH3
DYDFHSAHYDAFDV

SEQ ID NO: 594 - protein, 5 aa, ARTIFICIAL SEQUENCE
  Exemplary CDRH Sequences - CDRH1
SYSMN

SEQ ID NO: 595 - protein, 17 aa, ARTIFICIAL SEQUENCE
  Exemplary CDRH Sequences - CDRH2
SISSHSSYHSYADSVKG

SEQ ID NO: 596 - protein, 14 aa, ARTIFICIAL SEQUENCE
  Exemplary CDRH Sequences - CDRH3
DYDFHSAYYDAFDV

SEQ ID NO: 597 - protein, 5 aa, ARTIFICIAL SEQUENCE
  Exemplary CDRH Sequences - CDRH1
SYSMN

SEQ ID NO: 598 - protein, 17 aa, ARTIFICIAL SEQUENCE
  Exemplary CDRH Sequences - CDRH2
SISSHSSYISYADSVKG

SEQ ID NO: 599 - protein, 14 aa, ARTIFICIAL SEQUENCE
  Exemplary CDRH Sequences - CDRH3
DYDFHSAHYDAFDV

SEQ ID NO: 600 - protein, 5 aa, ARTIFICIAL SEQUENCE
  Exemplary CDRH Sequences - CDRH1
SYSMN

SEQ ID NO: 601 - protein, 17 aa, ARTIFICIAL SEQUENCE
  Exemplary CDRH Sequences - CDRH2
SISSSSHYHSYADSVKG

SEQ ID NO: 602 - protein, 14 aa, ARTIFICIAL SEQUENCE
  Exemplary CDRH Sequences - CDRH3
DYDFHSAYYDAFDV

SEQ ID NO: 603 - protein, 5 aa, ARTIFICIAL SEQUENCE
  Exemplary CDRH Sequences - CDRH1
SYSMN

SEQ ID NO: 604 - protein, 17 aa, ARTIFICIAL SEQUENCE
  Exemplary CDRH Sequences - CDRH2
SISSSSHYISHADSVKG

SEQ ID NO: 605 - protein, 14 aa, ARTIFICIAL SEQUENCE
  Exemplary CDRH Sequences - CDRH3
DYDFHSAYYDAFDV

SEQ ID NO: 606 - protein, 5 aa, ARTIFICIAL SEQUENCE
  Exemplary CDRH Sequences - CDRH1
SYSMN

SEQ ID NO: 607 - protein, 17 aa, ARTIFICIAL SEQUENCE
  Exemplary CDRH Sequences - CDRH2
SISSSSHYISYADHVKG

SEQ ID NO: 608 - protein, 14 aa, ARTIFICIAL SEQUENCE
  Exemplary CDRH Sequences - CDRH3
DYDFHSAYYDAFDV

SEQ ID NO: 609 - protein, 5 aa, ARTIFICIAL SEQUENCE
  Exemplary CDRH Sequences - CDRH1
SYSMN

SEQ ID NO: 610 - protein, 17 aa, ARTIFICIAL SEQUENCE
  Exemplary CDRH Sequences - CDRH2
SISSSSSYHSYADSVKG

SEQ ID NO: 611 - protein, 14 aa, ARTIFICIAL SEQUENCE
  Exemplary CDRH Sequences - CDRH3
DYDFHSAHYDAFDV

SEQ ID NO: 612 - protein, 5 aa, ARTIFICIAL SEQUENCE
  Exemplary CDRH Sequences - CDRH1
SYSMN

SEQ ID NO: 613 - protein, 17 aa, ARTIFICIAL SEQUENCE
  Exemplary CDRH Sequences - CDRH2
SISSSSSYHSYADSVKG

SEQ ID NO: 614 - protein, 14 aa, ARTIFICIAL SEQUENCE
  Exemplary CDRH Sequences - CDRH3
DYDFHSAYHDAFDV

SEQ ID NO: 615 - protein, 5 aa, ARTIFICIAL SEQUENCE
  Exemplary CDRH Sequences - CDRH1
SYSMN

SEQ ID NO: 616 - protein, 17 aa, ARTIFICIAL SEQUENCE
  Exemplary CDRH Sequences - CDRH2
SISSSSSYISHADSVKG

SEQ ID NO: 617 - protein, 14 aa, ARTIFICIAL SEQUENCE
  Exemplary CDRH Sequences - CDRH3
DYDFHSAHYDAFDV

SEQ ID NO: 618 - protein, 5 aa, ARTIFICIAL SEQUENCE
  Exemplary CDRH Sequences - CDRH1
SYSMN

SEQ ID NO: 619 - protein, 17 aa, ARTIFICIAL SEQUENCE
  Exemplary CDRH Sequences - CDRH2
SISSSSSYISYAHSVKG

SEQ ID NO: 620 - protein, 14 aa, ARTIFICIAL SEQUENCE
  Exemplary CDRH Sequences - CDRH3
DYDFHSAHYDAFDV

SEQ ID NO: 621 - protein, 5 aa, ARTIFICIAL SEQUENCE
  Exemplary CDRH Sequences - CDRH1
SYSMN

SEQ ID NO: 622 - protein, 17 aa, ARTIFICIAL SEQUENCE
  Exemplary CDRH Sequences - CDRH2
SISSSSSYISYAHSVKG

SEQ ID NO: 623 - protein, 14 aa, ARTIFICIAL SEQUENCE
  Exemplary CDRH Sequences - CDRH3
DYDFHSAYHDAFDV

SEQ ID NO: 624 - protein, 5 aa, ARTIFICIAL SEQUENCE
  Exemplary CDRH Sequences - CDRH1
SYSMN

SEQ ID NO: 625 - protein, 17 aa, ARTIFICIAL SEQUENCE
  Exemplary CDRH Sequences - CDRH2
SISSSSSYISYADHVKG

SEQ ID NO: 626 - protein, 14 aa, ARTIFICIAL SEQUENCE
  Exemplary CDRH Sequences - CDRH3
DYDFHSAHYDAFDV

SEQ ID NO: 627 - protein, 5 aa, ARTIFICIAL SEQUENCE
  Exemplary CDRH Sequences - CDRH1
SYWMS

SEQ ID NO: 628 - protein, 17 aa, ARTIFICIAL SEQUENCE
  Exemplary CDRH Sequences - CDRH2
SIKQDGSEKYYVDSVKG

SEQ ID NO: 629 - protein, 18 aa, ARTIFICIAL SEQUENCE
  Exemplary CDRH Sequences - CDRH3
DLVLMVYDIDYYYYGMDV

SEQ ID NO: 630 - protein, 5 aa, ARTIFICIAL SEQUENCE
  Exemplary CDRH Sequences - CDRH1
SYWMS

SEQ ID NO: 631 - protein, 17 aa, ARTIFICIAL SEQUENCE
  Exemplary CDRH Sequences - CDRH2
SIKQDGSEKYYVDSVKG

SEQ ID NO: 632 - protein, 18 aa, ARTIFICIAL SEQUENCE
  Exemplary CDRH Sequences - CDRH3
DLVLMVYDIDYYYYGMDV

SEQ ID NO: 633 - protein, 5 aa, ARTIFICIAL SEQUENCE
  Exemplary CDRH Sequences - CDRH1
SYWMS

SEQ ID NO: 634 - protein, 17 aa, ARTIFICIAL SEQUENCE
  Exemplary CDRH Sequences - CDRH2
SIKQDGSEKYYVDSVKG

SEQ ID NO: 635 - protein, 18 aa, ARTIFICIAL SEQUENCE
  Exemplary CDRH Sequences - CDRH3
DLVLMVYDIDYYYYGMDV

SEQ ID NO: 636 - protein, 5 aa, ARTIFICIAL SEQUENCE
  Exemplary CDRH Sequences - CDRH1
SYWMS

SEQ ID NO: 637 - protein, 17 aa, ARTIFICIAL SEQUENCE
  Exemplary CDRH Sequences - CDRH2
SIKQDGSEKYYVDSVKG

SEQ ID NO: 638 - protein, 18 aa, ARTIFICIAL SEQUENCE
  Exemplary CDRH Sequences - CDRH3
DLVLMVYDMDYYYYGMDV

SEQ ID NO: 639 - protein, 5 aa, ARTIFICIAL SEQUENCE
  Exemplary CDRH Sequences - CDRH1
SYWMS

SEQ ID NO: 640 - protein, 17 aa, ARTIFICIAL SEQUENCE
  Exemplary CDRH Sequences - CDRH2
SIKQDGSEKYYVDSVKG

SEQ ID NO: 641 - protein, 18 aa, ARTIFICIAL SEQUENCE
  Exemplary CDRH Sequences - CDRH3
DLVLMVYDMDYYYYGMDV

SEQ ID NO: 642 - protein, 5 aa, ARTIFICIAL SEQUENCE
  Exemplary CDRH Sequences - CDRH1
SYWMS

SEQ ID NO: 643 - protein, 17 aa, ARTIFICIAL SEQUENCE
  Exemplary CDRH Sequences - CDRH2
SIKQDGSEKYYVDSVKG

SEQ ID NO: 644 - protein, 18 aa, ARTIFICIAL SEQUENCE
  Exemplary CDRH Sequences - CDRH3
DLVLMVYDMDYYYYGMDV

SEQ ID NO: 645 - protein, 5 aa, ARTIFICIAL SEQUENCE
  Exemplary CDRH Sequences - CDRH1
SYWMS

SEQ ID NO: 646 - protein, 17 aa, ARTIFICIAL SEQUENCE
  Exemplary CDRH Sequences - CDRH2
SIKQDGSEKYYVDSVKG

SEQ ID NO: 647 - protein, 18 aa, ARTIFICIAL SEQUENCE
  Exemplary CDRH Sequences - CDRH3
DLVLMVYDMDYYYYGMDV

SEQ ID NO: 648 - protein, 5 aa, ARTIFICIAL SEQUENCE
  Exemplary CDRH Sequences - CDRH1
SYWMS

SEQ ID NO: 649 - protein, 17 aa, ARTIFICIAL SEQUENCE
  Exemplary CDRH Sequences - CDRH2
SIKQDGSEKYYVDSVKG

SEQ ID NO: 650 - protein, 18 aa, ARTIFICIAL SEQUENCE
  Exemplary CDRH Sequences - CDRH3
DLVLFVYDMDYYYYGMDV

SEQ ID NO: 651 - protein, 5 aa, ARTIFICIAL SEQUENCE
  Exemplary CDRH Sequences - CDRH1
SYWMS

SEQ ID NO: 652 - protein, 17 aa, ARTIFICIAL SEQUENCE
  Exemplary CDRH Sequences - CDRH2
SIKQDGSEKYYVDSVKG

SEQ ID NO: 653 - protein, 18 aa, ARTIFICIAL SEQUENCE
  Exemplary CDRH Sequences - CDRH3
DLVLFVYDMDYYYYGMDV

SEQ ID NO: 654 - protein, 5 aa, ARTIFICIAL SEQUENCE
  Exemplary CDRH Sequences - CDRH1
SYWMS

SEQ ID NO: 655 - protein, 17 aa, ARTIFICIAL SEQUENCE
  Exemplary CDRH Sequences - CDRH2
SIKQDGSEKYYVDSVKG

SEQ ID NO: 656 - protein, 18 aa, ARTIFICIAL SEQUENCE
  Exemplary CDRH Sequences - CDRH3
DLVLFVYDMDYYYYGMDV

SEQ ID NO: 657 - protein, 5 aa, ARTIFICIAL SEQUENCE
  Exemplary CDRH Sequences - CDRH1
SYWMS

SEQ ID NO: 658 - protein, 17 aa, ARTIFICIAL SEQUENCE
  Exemplary CDRH Sequences - CDRH2
SIKQDGSEKYYVDSVKG

SEQ ID NO: 659 - protein, 18 aa, ARTIFICIAL SEQUENCE
  Exemplary CDRH Sequences - CDRH3
DLVLFVYDMDYYYYGMDV

SEQ ID NO: 660 - protein, 5 aa, ARTIFICIAL SEQUENCE
  Exemplary CDRH Sequences - CDRH1
SYWMS

SEQ ID NO: 661 - protein, 17 aa, ARTIFICIAL SEQUENCE
  Exemplary CDRH Sequences - CDRH2
SIKQDGSEKYYVDSVKG

SEQ ID NO: 662 - protein, 18 aa, ARTIFICIAL SEQUENCE
  Exemplary CDRH Sequences - CDRH3
DLVLFVYDMDYYYYGMDV

SEQ ID NO: 663 - protein, 5 aa, ARTIFICIAL SEQUENCE
  Exemplary CDRH Sequences - CDRH1
SYWMS

SEQ ID NO: 664 - protein, 17 aa, ARTIFICIAL SEQUENCE
  Exemplary CDRH Sequences - CDRH2
SIKQDGSEKYYVDSVKG

SEQ ID NO: 665 - protein, 18 aa, ARTIFICIAL SEQUENCE
  Exemplary CDRH Sequences - CDRH3
DLVLFVYDMDYYYYGMDV

SEQ ID NO: 666 - protein, 5 aa, ARTIFICIAL SEQUENCE
  Exemplary CDRH Sequences - CDRH1
SYWMS

SEQ ID NO: 667 - protein, 17 aa, ARTIFICIAL SEQUENCE
  Exemplary CDRH Sequences - CDRH2
SIKQDGSEKYYVDSVKG

SEQ ID NO: 668 - protein, 18 aa, ARTIFICIAL SEQUENCE
  Exemplary CDRH Sequences - CDRH3
DLVLSVYDMDYYYYGMDV

SEQ ID NO: 669 - protein, 5 aa, ARTIFICIAL SEQUENCE
  Exemplary CDRH Sequences - CDRH1
SYWMS

SEQ ID NO: 670 - protein, 17 aa, ARTIFICIAL SEQUENCE
  Exemplary CDRH Sequences - CDRH2
SIKQDGSEKYYVDSVKG

SEQ ID NO: 671 - protein, 18 aa, ARTIFICIAL SEQUENCE
  Exemplary CDRH Sequences - CDRH3
DLVLSVYDMDYYYYGMDV

SEQ ID NO: 672 - protein, 5 aa, ARTIFICIAL SEQUENCE
  Exemplary CDRH Sequences - CDRH1
SYWMS

SEQ ID NO: 673 - protein, 17 aa, ARTIFICIAL SEQUENCE
  Exemplary CDRH Sequences - CDRH2
SIKQDGSEKYYVDSVKG

SEQ ID NO: 674 - protein, 18 aa, ARTIFICIAL SEQUENCE
  Exemplary CDRH Sequences - CDRH3
DLVLSVYDMDYYYYGMDV

SEQ ID NO: 675 - protein, 5 aa, ARTIFICIAL SEQUENCE
  Exemplary CDRH Sequences - CDRH1
SYWMS

SEQ ID NO: 676 - protein, 17 aa, ARTIFICIAL SEQUENCE
  Exemplary CDRH Sequences - CDRH2
SIKQDGSEKYYVDSVKG

SEQ ID NO: 677 - protein, 18 aa, ARTIFICIAL SEQUENCE
  Exemplary CDRH Sequences - CDRH3
DLVLSVYDMDYYYYGMDV

SEQ ID NO: 678 - protein, 5 aa, ARTIFICIAL SEQUENCE
  Exemplary CDRH Sequences - CDRH1
SYWMS

SEQ ID NO: 679 - protein, 17 aa, ARTIFICIAL SEQUENCE
  Exemplary CDRH Sequences - CDRH2
SIKQDGSEKYYVDSVKG

SEQ ID NO: 680 - protein, 18 aa, ARTIFICIAL SEQUENCE
  Exemplary CDRH Sequences - CDRH3
DLVLSVYDMDYYYYGMDV

SEQ ID NO: 681 - protein, 5 aa, ARTIFICIAL SEQUENCE
  Exemplary CDRH Sequences - CDRH1
SYWMS

SEQ ID NO: 682 - protein, 17 aa, ARTIFICIAL SEQUENCE
  Exemplary CDRH Sequences - CDRH2
SIKQDGSEKYYVDSVKG

SEQ ID NO: 683 - protein, 18 aa, ARTIFICIAL SEQUENCE
  Exemplary CDRH Sequences - CDRH3
DLVLSVYDMDYYYYGMDV

SEQ ID NO: 684 - protein, 5 aa, ARTIFICIAL SEQUENCE
  Exemplary CDRH Sequences - CDRH1
SYWMS

SEQ ID NO: 685 - protein, 17 aa, ARTIFICIAL SEQUENCE
  Exemplary CDRH Sequences - CDRH2
SIKQDGSEKYYVDSVKG

SEQ ID NO: 686 - protein, 18 aa, ARTIFICIAL SEQUENCE
  Exemplary CDRH Sequences - CDRH3
DLVLSVYDMDYYYYGMDV

SEQ ID NO: 687 - protein, 5 aa, ARTIFICIAL SEQUENCE
  Exemplary CDRH Sequences - CDRH1
SYWMS

SEQ ID NO: 688 - protein, 17 aa, ARTIFICIAL SEQUENCE
  Exemplary CDRH Sequences - CDRH2
SIKQDGSEKYYVDSVKG

SEQ ID NO: 689 - protein, 18 aa, ARTIFICIAL SEQUENCE
  Exemplary CDRH Sequences - CDRH3
DLVLSVYDMDYYYYGMDV

SEQ ID NO: 690 - protein, 5 aa, ARTIFICIAL SEQUENCE
  Exemplary CDRH Sequences - CDRH1
SYWMS

SEQ ID NO: 691 - protein, 17 aa, ARTIFICIAL SEQUENCE
  Exemplary CDRH Sequences - CDRH2
SIKQDGSEKYYVDSVKG

SEQ ID NO: 692 - protein, 18 aa, ARTIFICIAL SEQUENCE
  Exemplary CDRH Sequences - CDRH3
DLVLFVYDMDYYYYGMDV

SEQ ID NO: 693 - protein, 5 aa, ARTIFICIAL SEQUENCE
  Exemplary CDRH Sequences - CDRH1
SYWMS

SEQ ID NO: 694 - protein, 17 aa, ARTIFICIAL SEQUENCE
  Exemplary CDRH Sequences - CDRH2
SIKQDGSEKYYVDSVKG

SEQ ID NO: 695 - protein, 18 aa, ARTIFICIAL SEQUENCE
  Exemplary CDRH Sequences - CDRH3
DLVLMVYDIDYYYYGMDV

SEQ ID NO: 696 - protein, 5 aa, ARTIFICIAL SEQUENCE
  Exemplary CDRH Sequences - CDRH1
SYWMS

SEQ ID NO: 697 - protein, 17 aa, ARTIFICIAL SEQUENCE
  Exemplary CDRH Sequences - CDRH2
SIKQDGSEKYYVDSVKG

SEQ ID NO: 698 - protein, 18 aa, ARTIFICIAL SEQUENCE
  Exemplary CDRH Sequences - CDRH3
DLVLMVYDMDYYYYGMDV

SEQ ID NO: 699 - protein, 5 aa, ARTIFICIAL SEQUENCE
  Exemplary CDRH Sequences - CDRH1
SYWMS

SEQ ID NO: 700 - protein, 17 aa, ARTIFICIAL SEQUENCE
  Exemplary CDRH Sequences - CDRH2
SIKQDGSEKYYVDSVKG

SEQ ID NO: 701 - protein, 18 aa, ARTIFICIAL SEQUENCE
  Exemplary CDRH Sequences - CDRH3
DLVLMVYDMDYYYYGMDV

SEQ ID NO: 702 - protein, 5 aa, ARTIFICIAL SEQUENCE
  Exemplary CDRH Sequences - CDRH1
SYWMS

SEQ ID NO: 703 - protein, 17 aa, ARTIFICIAL SEQUENCE
  Exemplary CDRH Sequences - CDRH2
SIKQDGSEKYYVDSVKG

SEQ ID NO: 704 - protein, 18 aa, ARTIFICIAL SEQUENCE
  Exemplary CDRH Sequences - CDRH3
DLVLMVYDMDYYYYGMDV

SEQ ID NO: 705 - protein, 5 aa, ARTIFICIAL SEQUENCE
  Exemplary CDRH Sequences - CDRH1
SYWMS

SEQ ID NO: 706 - protein, 17 aa, ARTIFICIAL SEQUENCE
  Exemplary CDRH Sequences - CDRH2
SIKQDGSEKYYVDSVKG

SEQ ID NO: 707 - protein, 18 aa, ARTIFICIAL SEQUENCE
  Exemplary CDRH Sequences - CDRH3
DLVLMVYDMDYYYYGMDV

SEQ ID NO: 708 - protein, 5 aa, ARTIFICIAL SEQUENCE
  Exemplary CDRH Sequences - CDRH1
SYWMS

SEQ ID NO: 709 - protein, 17 aa, ARTIFICIAL SEQUENCE
  Exemplary CDRH Sequences - CDRH2
SIKQDGSEKYYVDSVKG

SEQ ID NO: 710 - protein, 18 aa, ARTIFICIAL SEQUENCE
  Exemplary CDRH Sequences - CDRH3
DLVLSVYDMDYYYYGMDV

SEQ ID NO: 711 - protein, 5 aa, ARTIFICIAL SEQUENCE
  Exemplary CDRH Sequences - CDRH1
SYWMS

SEQ ID NO: 712 - protein, 17 aa, ARTIFICIAL SEQUENCE
  Exemplary CDRH Sequences - CDRH2
SIKQDGSEKYYVDSVKG

SEQ ID NO: 713 - protein, 18 aa, ARTIFICIAL SEQUENCE
  Exemplary CDRH Sequences - CDRH3
DLVLFVYDMDYYYYGMDV

SEQ ID NO: 714 - protein, 5 aa, ARTIFICIAL SEQUENCE
  Exemplary CDRH Sequences - CDRH1
SYWMS

SEQ ID NO: 715 - protein, 17 aa, ARTIFICIAL SEQUENCE
  Exemplary CDRH Sequences - CDRH2
SIKQDGSEKYYVDSVKG

SEQ ID NO: 716 - protein, 18 aa, ARTIFICIAL SEQUENCE
  Exemplary CDRH Sequences - CDRH3
DLVLMVYDMDYYYYGMDV

SEQ ID NO: 717 - protein, 5 aa, ARTIFICIAL SEQUENCE
  Exemplary CDRH Sequences - CDRH1
SYWMS

SEQ ID NO: 718 - protein, 17 aa, ARTIFICIAL SEQUENCE
  Exemplary CDRH Sequences - CDRH2
SIKQDGSEKYYVDSVKG

SEQ ID NO: 719 - protein, 18 aa, ARTIFICIAL SEQUENCE
  Exemplary CDRH Sequences - CDRH3
DLVLFVYDMDYYYYGMDV

SEQ ID NO: 720 - protein, 5 aa, ARTIFICIAL SEQUENCE
  Exemplary CDRH Sequences - CDRH1
SYWMS

SEQ ID NO: 721 - protein, 17 aa, ARTIFICIAL SEQUENCE
  Exemplary CDRH Sequences - CDRH2
SIKQDGSEKYYVDSVKG

SEQ ID NO: 722 - protein, 18 aa, ARTIFICIAL SEQUENCE
  Exemplary CDRH Sequences - CDRH3
DLVLMVYDMDYYYYGMDV

SEQ ID NO: 723 - protein, 5 aa, ARTIFICIAL SEQUENCE
  Exemplary CDRH Sequences - CDRH1
SYWMS

SEQ ID NO: 724 - protein, 17 aa, ARTIFICIAL SEQUENCE
  Exemplary CDRH Sequences - CDRH2
SIKQDGSEKYYVDSVKG

SEQ ID NO: 725 - protein, 18 aa, ARTIFICIAL SEQUENCE
  Exemplary CDRH Sequences - CDRH3
DLVLSVYDMDYYYYGMDV

SEQ ID NO: 726 - protein, 5 aa, ARTIFICIAL SEQUENCE
  Exemplary CDRH Sequences - CDRH1
SYWMS

SEQ ID NO: 727 - protein, 17 aa, ARTIFICIAL SEQUENCE
  Exemplary CDRH Sequences - CDRH2
SIKQDGSEKYYVDSVKG

SEQ ID NO: 728 - protein, 18 aa, ARTIFICIAL SEQUENCE
  Exemplary CDRH Sequences - CDRH3
DLVLSVYDMDYYYYGMDV

SEQ ID NO: 729 - protein, 5 aa, ARTIFICIAL SEQUENCE
  Exemplary CDRH Sequences - CDRH1
SYWMS

SEQ ID NO: 730 - protein, 17 aa, ARTIFICIAL SEQUENCE
  Exemplary CDRH Sequences - CDRH2
SIKQDGSEKYYVDSVKG

SEQ ID NO: 731 - protein, 18 aa, ARTIFICIAL SEQUENCE
  Exemplary CDRH Sequences - CDRH3
DLVLFVYDMDYYYYGMDV

SEQ ID NO: 732 - protein, 5 aa, ARTIFICIAL SEQUENCE
  Exemplary CDRH Sequences - CDRH1
SYWMS

SEQ ID NO: 733 - protein, 17 aa, ARTIFICIAL SEQUENCE
  Exemplary CDRH Sequences - CDRH2
SIKQDGSEKYYVDSVKG

SEQ ID NO: 734 - protein, 18 aa, ARTIFICIAL SEQUENCE
  Exemplary CDRH Sequences - CDRH3
DLVLNVYDMDYYYYGMDV

SEQ ID NO: 735 - protein, 5 aa, ARTIFICIAL SEQUENCE
  Exemplary CDRH Sequences - CDRH1
SYWMS

SEQ ID NO: 736 - protein, 17 aa, ARTIFICIAL SEQUENCE
  Exemplary CDRH Sequences - CDRH2
SIKQDGSEKYYVDSVKG

SEQ ID NO: 737 - protein, 18 aa, ARTIFICIAL SEQUENCE
  Exemplary CDRH Sequences - CDRH3
DLVLMVYDIDYYYYGMDV

SEQ ID NO: 738 - protein, 5 aa, ARTIFICIAL SEQUENCE
  Exemplary CDRH Sequences - CDRH1
SYWMS

SEQ ID NO: 739 - protein, 17 aa, ARTIFICIAL SEQUENCE
  Exemplary CDRH Sequences - CDRH2
SIKQDGSEKYYVDSVKG

SEQ ID NO: 740 - protein, 18 aa, ARTIFICIAL SEQUENCE
  Exemplary CDRH Sequences - CDRH3
DLVLNVYDMDYYYYGMDV

SEQ ID NO: 741 - protein, 5 aa, ARTIFICIAL SEQUENCE
  Exemplary CDRH Sequences - CDRH1
SYWMS

SEQ ID NO: 742 - protein, 17 aa, ARTIFICIAL SEQUENCE
  Exemplary CDRH Sequences - CDRH2
SIKQDGSEKYYVDSVKG

SEQ ID NO: 743 - protein, 18 aa, ARTIFICIAL SEQUENCE
  Exemplary CDRH Sequences - CDRH3
DLVLMVYDIDYYYYGMDV

SEQ ID NO: 744 - protein, 5 aa, ARTIFICIAL SEQUENCE
  Exemplary CDRH Sequences - CDRH1
SYWMS

SEQ ID NO: 745 - protein, 17 aa, ARTIFICIAL SEQUENCE
  Exemplary CDRH Sequences - CDRH2
SIKQDGSEKYYVDSVKG

SEQ ID NO: 746 - protein, 18 aa, ARTIFICIAL SEQUENCE
  Exemplary CDRH Sequences - CDRH3
DLVLSVYDMDYYYYGMDV

SEQ ID NO: 747 - protein, 5 aa, ARTIFICIAL SEQUENCE
  Exemplary CDRH Sequences - CDRH1
SYWMS

SEQ ID NO: 748 - protein, 17 aa, ARTIFICIAL SEQUENCE
  Exemplary CDRH Sequences - CDRH2
SIKQDGSEKYYVDSVKG

SEQ ID NO: 749 - protein, 18 aa, ARTIFICIAL SEQUENCE
  Exemplary CDRH Sequences - CDRH3
DLVLNVYDMDYYYYGMDV

SEQ ID NO: 750 - protein, 5 aa, ARTIFICIAL SEQUENCE
  Exemplary CDRH Sequences - CDRH1
SFGMH

SEQ ID NO: 751 - protein, 17 aa, ARTIFICIAL SEQUENCE
  Exemplary CDRH Sequences - CDRH2
LIWSDGSDEYYADSVKG

SEQ ID NO: 752 - protein, 13 aa, ARTIFICIAL SEQUENCE
  Exemplary CDRH Sequences - CDRH3
AIAALYYYYGMDV

SEQ ID NO: 753 - protein, 5 aa, ARTIFICIAL SEQUENCE
  Exemplary CDRH Sequences - CDRH1
SYAMN

SEQ ID NO: 754 - protein, 17 aa, ARTIFICIAL SEQUENCE
  Exemplary CDRH Sequences - CDRH2
TISGSGGNTYYADSVKG

SEQ ID NO: 755 - protein, 12 aa, ARTIFICIAL SEQUENCE
  Exemplary CDRH Sequences - CDRH3
KFVLMVYAMLDY

SEQ ID NO: 756 - protein, 5 aa, ARTIFICIAL SEQUENCE
  Exemplary CDRH Sequences - CDRH1
SYWMS

SEQ ID NO: 757 - protein, 17 aa, ARTIFICIAL SEQUENCE
  Exemplary CDRH Sequences - CDRH2
SIKQDGSEKYYVDSVKG

SEQ ID NO: 758 - protein, 18 aa, ARTIFICIAL SEQUENCE
  Exemplary CDRH Sequences - CDRH3
DLVLMVYDIDYYYYGMDV

SEQ ID NO: 759 - protein, 5 aa, ARTIFICIAL SEQUENCE
  Exemplary CDRH Sequences - CDRH1
SYWMS

SEQ ID NO: 760 - protein, 17 aa, ARTIFICIAL SEQUENCE
  Exemplary CDRH Sequences - CDRH2
SIKQDGSEKYYVDSVKG

SEQ ID NO: 761 - protein, 18 aa, ARTIFICIAL SEQUENCE
  Exemplary CDRH Sequences - CDRH3
DLVLMVYDLDYYYYGMDV

SEQ ID NO: 762 - protein, 5 aa, ARTIFICIAL SEQUENCE
  Exemplary CDRH Sequences - CDRH1
SYWMS

SEQ ID NO: 763 - protein, 17 aa, ARTIFICIAL SEQUENCE
  Exemplary CDRH Sequences - CDRH2
SIKQDGSEKYYVDSVKG

SEQ ID NO: 764 - protein, 18 aa, ARTIFICIAL SEQUENCE
  Exemplary CDRH Sequences - CDRH3
DLVLMVYDMDYYYYGMDV

SEQ ID NO: 765 - protein, 5 aa, ARTIFICIAL SEQUENCE
  Exemplary CDRH Sequences - CDRH1
SYWMS

SEQ ID NO: 766 - protein, 17 aa, ARTIFICIAL SEQUENCE
  Exemplary CDRH Sequences - CDRH2
SIKQDGSEKYYVDSVKG

SEQ ID NO: 767 - protein, 18 aa, ARTIFICIAL SEQUENCE
  Exemplary CDRH Sequences - CDRH3
DLVLMVYDMDYYYYGMDV

SEQ ID NO: 768 - protein, 5 aa, ARTIFICIAL SEQUENCE
  Exemplary CDRH Sequences - CDRH1
SYWMS

SEQ ID NO: 769 - protein, 17 aa, ARTIFICIAL SEQUENCE
  Exemplary CDRH Sequences - CDRH2
SIKQDGSEKYYVDSVKG

SEQ ID NO: 770 - protein, 18 aa, ARTIFICIAL SEQUENCE
  Exemplary CDRH Sequences - CDRH3
DLVLMVYDMDYYYYGMDV

SEQ ID NO: 771 - protein, 5 aa, ARTIFICIAL SEQUENCE
  Exemplary CDRH Sequences - CDRH1
SYWMS

SEQ ID NO: 772 - protein, 17 aa, ARTIFICIAL SEQUENCE
  Exemplary CDRH Sequences - CDRH2
SIKQDGSEKYYVDSVKG

SEQ ID NO: 773 - protein, 18 aa, ARTIFICIAL SEQUENCE
  Exemplary CDRH Sequences - CDRH3
DLVLMVYDMDYYYYGMDV

SEQ ID NO: 774 - protein, 16 aa, ARTIFICIAL SEQUENCE
  Exemplary CDRL Sequences - CDRL1
RSSQSLLHSNGYNYLD

SEQ ID NO: 775 - protein, 7 aa, ARTIFICIAL SEQUENCE
  Exemplary CDRL Sequences - CDRL2
LGSNRAS

SEQ ID NO: 776 - protein, 9 aa, ARTIFICIAL SEQUENCE
  Exemplary CDRL Sequences - CDRL3
MQALQTPLT

SEQ ID NO: 777 - protein, 16 aa, ARTIFICIAL SEQUENCE
  Exemplary CDRL Sequences - CDRL1
RSSQSLLHSNGYNYLD

SEQ ID NO: 778 - protein, 7 aa, ARTIFICIAL SEQUENCE
  Exemplary CDRL Sequences - CDRL2
LGSNRAS

SEQ ID NO: 779 - protein, 9 aa, ARTIFICIAL SEQUENCE
  Exemplary CDRL Sequences - CDRL3
MQALQTPLT

SEQ ID NO: 780 - protein, 16 aa, ARTIFICIAL SEQUENCE
  Exemplary CDRL Sequences - CDRL1
RSSQSLLHSNGYNYLD

SEQ ID NO: 781 - protein, 7 aa, ARTIFICIAL SEQUENCE
  Exemplary CDRL Sequences - CDRL2
LGLNRAS

SEQ ID NO: 782 - protein, 9 aa, ARTIFICIAL SEQUENCE
  Exemplary CDRL Sequences - CDRL3
MQALQTPLT

SEQ ID NO: 783 - protein, 14 aa, ARTIFICIAL SEQUENCE
  Exemplary CDRL Sequences - CDRL1
TGSRSNIGAGYDVN

SEQ ID NO: 784 - protein, 7 aa, ARTIFICIAL SEQUENCE
  Exemplary CDRL Sequences - CDRL2
GNSNRPS

SEQ ID NO: 785 - protein, 11 aa, ARTIFICIAL SEQUENCE
  Exemplary CDRL Sequences - CDRL3
QSYDSNLSGSV

SEQ ID NO: 786 - protein, 17 aa, ARTIFICIAL SEQUENCE
  Exemplary CDRL Sequences - CDRL1
KSSQNVLYSSSNKNYLV

SEQ ID NO: 787 - protein, 7 aa, ARTIFICIAL SEQUENCE
  Exemplary CDRL Sequences - CDRL2
WASTRES

SEQ ID NO: 788 - protein, 9 aa, ARTIFICIAL SEQUENCE
  Exemplary CDRL Sequences - CDRL3
HQYYSTPWT

SEQ ID NO: 789 - protein, 13 aa, ARTIFICIAL SEQUENCE
  Exemplary CDRL Sequences - CDRL1
SGSNSNIGSNTVN

SEQ ID NO: 790 - protein, 7 aa, ARTIFICIAL SEQUENCE
  Exemplary CDRL Sequences - CDRL2
SNNQRPS

SEQ ID NO: 791 - protein, 11 aa, ARTIFICIAL SEQUENCE
  Exemplary CDRL Sequences - CDRL3
AAWDDSLNGWV

SEQ ID NO: 792 - protein, 14 aa, ARTIFICIAL SEQUENCE
  Exemplary CDRL Sequences - CDRL1
TGTSSDVGGYNSVS

SEQ ID NO: 793 - protein, 7 aa, ARTIFICIAL SEQUENCE
  Exemplary CDRL Sequences - CDRL2
EVSNRPS

SEQ ID NO: 794 - protein, 9 aa, ARTIFICIAL SEQUENCE
  Exemplary CDRL Sequences - CDRL3
SSYTSTSMV

SEQ ID NO: 795 - protein, 14 aa, ARTIFICIAL SEQUENCE
  Exemplary CDRL Sequences - CDRL1
TGTSSDVGGYNSVS

SEQ ID NO: 796 - protein, 7 aa, ARTIFICIAL SEQUENCE
  Exemplary CDRL Sequences - CDRL2
EVSNRPS

SEQ ID NO: 797 - protein, 9 aa, ARTIFICIAL SEQUENCE
  Exemplary CDRL Sequences - CDRL3
SSYTSTSMV

SEQ ID NO: 798 - protein, 14 aa, ARTIFICIAL SEQUENCE
  Exemplary CDRL Sequences - CDRL1
TGSSSNIGAGHDVH

SEQ ID NO: 799 - protein, 7 aa, ARTIFICIAL SEQUENCE
  Exemplary CDRL Sequences - CDRL2
GNSNRPS

SEQ ID NO: 800 - protein, 11 aa, ARTIFICIAL SEQUENCE
  Exemplary CDRL Sequences - CDRL3
QSYDSSLSGSV

SEQ ID NO: 801 - protein, 14 aa, ARTIFICIAL SEQUENCE
  Exemplary CDRL Sequences - CDRL1
TGSSSNIGAGHDVH

SEQ ID NO: 802 - protein, 7 aa, ARTIFICIAL SEQUENCE
  Exemplary CDRL Sequences - CDRL2
GNSNRPS

SEQ ID NO: 803 - protein, 11 aa, ARTIFICIAL SEQUENCE
  Exemplary CDRL Sequences - CDRL3
QSYDSSLSGSV

SEQ ID NO: 804 - protein, 14 aa, ARTIFICIAL SEQUENCE
  Exemplary CDRL Sequences - CDRL1
TGSSSNIGAGHDVH

SEQ ID NO: 805 - protein, 7 aa, ARTIFICIAL SEQUENCE
  Exemplary CDRL Sequences - CDRL2
GNSNRPS

SEQ ID NO: 806 - protein, 11 aa, ARTIFICIAL SEQUENCE
  Exemplary CDRL Sequences - CDRL3
QSYDSSLSGSV

SEQ ID NO: 807 - protein, 14 aa, ARTIFICIAL SEQUENCE
  Exemplary CDRL Sequences - CDRL1
TGSSSNIGAGHDVH

SEQ ID NO: 808 - protein, 7 aa, ARTIFICIAL SEQUENCE
  Exemplary CDRL Sequences - CDRL2
GNSNRPS

SEQ ID NO: 809 - protein, 11 aa, ARTIFICIAL SEQUENCE
  Exemplary CDRL Sequences - CDRL3
QSYDSSLSGSV

SEQ ID NO: 810 - protein, 14 aa, ARTIFICIAL SEQUENCE
  Exemplary CDRL Sequences - CDRL1
TGSSSNIGAGYDVH

SEQ ID NO: 811 - protein, 7 aa, ARTIFICIAL SEQUENCE
  Exemplary CDRL Sequences - CDRL2
GNSNRPS

SEQ ID NO: 812 - protein, 11 aa, ARTIFICIAL SEQUENCE
  Exemplary CDRL Sequences - CDRL3
QSYDSSLHGSV

SEQ ID NO: 813 - protein, 14 aa, ARTIFICIAL SEQUENCE
  Exemplary CDRL Sequences - CDRL1
TGSSSNIGAGYDVH

SEQ ID NO: 814 - protein, 7 aa, ARTIFICIAL SEQUENCE
  Exemplary CDRL Sequences - CDRL2
GNSNRPS

SEQ ID NO: 815 - protein, 11 aa, ARTIFICIAL SEQUENCE
  Exemplary CDRL Sequences - CDRL3
QSYDSSLHGSV

SEQ ID NO: 816 - protein, 14 aa, ARTIFICIAL SEQUENCE
  Exemplary CDRL Sequences - CDRL1
TGSSSNIGAGYDVH

SEQ ID NO: 817 - protein, 7 aa, ARTIFICIAL SEQUENCE
  Exemplary CDRL Sequences - CDRL2
GNSNRPS

SEQ ID NO: 818 - protein, 11 aa, ARTIFICIAL SEQUENCE
  Exemplary CDRL Sequences - CDRL3
QSYDSSLHGSV

SEQ ID NO: 819 - protein, 14 aa, ARTIFICIAL SEQUENCE
  Exemplary CDRL Sequences - CDRL1
TGSSSNIGAGYDVH

SEQ ID NO: 820 - protein, 7 aa, ARTIFICIAL SEQUENCE
  Exemplary CDRL Sequences - CDRL2
GNSNRPS

SEQ ID NO: 821 - protein, 11 aa, ARTIFICIAL SEQUENCE
  Exemplary CDRL Sequences - CDRL3
QSYDSSLSGSV

SEQ ID NO: 822 - protein, 14 aa, ARTIFICIAL SEQUENCE
  Exemplary CDRL Sequences - CDRL1
TGSSSNIGAGYDVH

SEQ ID NO: 823 - protein, 7 aa, ARTIFICIAL SEQUENCE
  Exemplary CDRL Sequences - CDRL2
GNSNRPS

SEQ ID NO: 824 - protein, 11 aa, ARTIFICIAL SEQUENCE
  Exemplary CDRL Sequences - CDRL3
QSYDSSLSGSV

SEQ ID NO: 825 - protein, 14 aa, ARTIFICIAL SEQUENCE
  Exemplary CDRL Sequences - CDRL1
TGSSSNIGAGYDVH

SEQ ID NO: 826 - protein, 7 aa, ARTIFICIAL SEQUENCE
  Exemplary CDRL Sequences - CDRL2
GNSNRPS

SEQ ID NO: 827 - protein, 11 aa, ARTIFICIAL SEQUENCE
  Exemplary CDRL Sequences - CDRL3
QSYDSSLSGSV

SEQ ID NO: 828 - protein, 14 aa, ARTIFICIAL SEQUENCE
  Exemplary CDRL Sequences - CDRL1
TGSSSNIGAGYDVH

SEQ ID NO: 829 - protein, 7 aa, ARTIFICIAL SEQUENCE
  Exemplary CDRL Sequences - CDRL2
GNSNRPS

SEQ ID NO: 830 - protein, 11 aa, ARTIFICIAL SEQUENCE
  Exemplary CDRL Sequences - CDRL3
QSYDSSLSGSV

SEQ ID NO: 831 - protein, 14 aa, ARTIFICIAL SEQUENCE
  Exemplary CDRL Sequences - CDRL1
TGSSSNIGAGYDVH

SEQ ID NO: 832 - protein, 7 aa, ARTIFICIAL SEQUENCE
  Exemplary CDRL Sequences - CDRL2
GNSNRPS

SEQ ID NO: 833 - protein, 11 aa, ARTIFICIAL SEQUENCE
  Exemplary CDRL Sequences - CDRL3
QSYDSSLSGSV

SEQ ID NO: 834 - protein, 14 aa, ARTIFICIAL SEQUENCE
  Exemplary CDRL Sequences - CDRL1
TGSSSNIGAGYDVH

SEQ ID NO: 835 - protein, 7 aa, ARTIFICIAL SEQUENCE
  Exemplary CDRL Sequences - CDRL2
GNSNRPS

SEQ ID NO: 836 - protein, 11 aa, ARTIFICIAL SEQUENCE
  Exemplary CDRL Sequences - CDRL3
QSYDSSLSGSV

SEQ ID NO: 837 - protein, 14 aa, ARTIFICIAL SEQUENCE
  Exemplary CDRL Sequences - CDRL1
TGSSSNIGAGYDVH

SEQ ID NO: 838 - protein, 7 aa, ARTIFICIAL SEQUENCE
  Exemplary CDRL Sequences - CDRL2
GNSNRPS

SEQ ID NO: 839 - protein, 11 aa, ARTIFICIAL SEQUENCE
  Exemplary CDRL Sequences - CDRL3
QSYDSSLSGSV

SEQ ID NO: 840 - protein, 14 aa, ARTIFICIAL SEQUENCE
  Exemplary CDRL Sequences - CDRL1
TGSSSNIGAGYDVH

SEQ ID NO: 841 - protein, 7 aa, ARTIFICIAL SEQUENCE
  Exemplary CDRL Sequences - CDRL2
GNSNRPS

SEQ ID NO: 842 - protein, 11 aa, ARTIFICIAL SEQUENCE
  Exemplary CDRL Sequences - CDRL3
QSYDSSLSGSV

SEQ ID NO: 843 - protein, 14 aa, ARTIFICIAL SEQUENCE
  Exemplary CDRL Sequences - CDRL1
TGSSSNIGAGYDVH

SEQ ID NO: 844 - protein, 7 aa, ARTIFICIAL SEQUENCE
  Exemplary CDRL Sequences - CDRL2
GNSNRPS

SEQ ID NO: 845 - protein, 11 aa, ARTIFICIAL SEQUENCE
  Exemplary CDRL Sequences - CDRL3
QSYDSSLSGSV

SEQ ID NO: 846 - protein, 14 aa, ARTIFICIAL SEQUENCE
  Exemplary CDRL Sequences - CDRL1
TGSSSNIGAGYDVH

SEQ ID NO: 847 - protein, 7 aa, ARTIFICIAL SEQUENCE
  Exemplary CDRL Sequences - CDRL2
GNSNRPS

SEQ ID NO: 848 - protein, 11 aa, ARTIFICIAL SEQUENCE
  Exemplary CDRL Sequences - CDRL3
QSYDSSLSGSV

SEQ ID NO: 849 - protein, 14 aa, ARTIFICIAL SEQUENCE
  Exemplary CDRL Sequences - CDRL1
TGSSSNIGAGYDVH

SEQ ID NO: 850 - protein, 7 aa, ARTIFICIAL SEQUENCE
  Exemplary CDRL Sequences - CDRL2
GNSNRPS

SEQ ID NO: 851 - protein, 11 aa, ARTIFICIAL SEQUENCE
  Exemplary CDRL Sequences - CDRL3
QSYDSSLSGSV

SEQ ID NO: 852 - protein, 14 aa, ARTIFICIAL SEQUENCE
  Exemplary CDRL Sequences - CDRL1
TGSSSNIGAGYDVH

SEQ ID NO: 853 - protein, 7 aa, ARTIFICIAL SEQUENCE
  Exemplary CDRL Sequences - CDRL2
GNSNRPS

SEQ ID NO: 854 - protein, 11 aa, ARTIFICIAL SEQUENCE
  Exemplary CDRL Sequences - CDRL3
QSYDSSLSGSV

SEQ ID NO: 855 - protein, 14 aa, ARTIFICIAL SEQUENCE
  Exemplary CDRL Sequences - CDRL1
TGSSSNIGAGYDVH

SEQ ID NO: 856 - protein, 7 aa, ARTIFICIAL SEQUENCE
  Exemplary CDRL Sequences - CDRL2
GNSNRPS

SEQ ID NO: 857 - protein, 11 aa, ARTIFICIAL SEQUENCE
  Exemplary CDRL Sequences - CDRL3
QSYDSSLSGSV

SEQ ID NO: 858 - protein, 14 aa, ARTIFICIAL SEQUENCE
  Exemplary CDRL Sequences - CDRL1
TGSSSNIGAGYDVH

SEQ ID NO: 859 - protein, 7 aa, ARTIFICIAL SEQUENCE
  Exemplary CDRL Sequences - CDRL2
GNSNRPS

SEQ ID NO: 860 - protein, 11 aa, ARTIFICIAL SEQUENCE
  Exemplary CDRL Sequences - CDRL3
QSYDSSLSGSV

SEQ ID NO: 861 - protein, 14 aa, ARTIFICIAL SEQUENCE
  Exemplary CDRL Sequences - CDRL1
TGSSSNIGAGYDVH

SEQ ID NO: 862 - protein, 7 aa, ARTIFICIAL SEQUENCE
  Exemplary CDRL Sequences - CDRL2
GNSNRPS

SEQ ID NO: 863 - protein, 11 aa, ARTIFICIAL SEQUENCE
  Exemplary CDRL Sequences - CDRL3
QSYDSSLSGSV

SEQ ID NO: 864 - protein, 14 aa, ARTIFICIAL SEQUENCE
  Exemplary CDRL Sequences - CDRL1
TGSSSNIGAGYDVH

SEQ ID NO: 865 - protein, 7 aa, ARTIFICIAL SEQUENCE
  Exemplary CDRL Sequences - CDRL2
GNSNRPS

SEQ ID NO: 866 - protein, 11 aa, ARTIFICIAL SEQUENCE
  Exemplary CDRL Sequences - CDRL3
QSYDSSLSGSV

SEQ ID NO: 867 - protein, 14 aa, ARTIFICIAL SEQUENCE
  Exemplary CDRL Sequences - CDRL1
TGSSSNIGAGYDVH

SEQ ID NO: 868 - protein, 7 aa, ARTIFICIAL SEQUENCE
  Exemplary CDRL Sequences - CDRL2
GNSNRPS

SEQ ID NO: 869 - protein, 11 aa, ARTIFICIAL SEQUENCE
  Exemplary CDRL Sequences - CDRL3
QSYDSSLSGSV

SEQ ID NO: 870 - protein, 14 aa, ARTIFICIAL SEQUENCE
  Exemplary CDRL Sequences - CDRL1
TGSSSNIGAGYDVH

SEQ ID NO: 871 - protein, 7 aa, ARTIFICIAL SEQUENCE
  Exemplary CDRL Sequences - CDRL2
GNSNRPS

SEQ ID NO: 872 - protein, 11 aa, ARTIFICIAL SEQUENCE
  Exemplary CDRL Sequences - CDRL3
QSYDSSLSGSV

SEQ ID NO: 873 - protein, 14 aa, ARTIFICIAL SEQUENCE
  Exemplary CDRL Sequences - CDRL1
TGSSSNIGAGYDVH

SEQ ID NO: 874 - protein, 7 aa, ARTIFICIAL SEQUENCE
  Exemplary CDRL Sequences - CDRL2
GNSNRPS

SEQ ID NO: 875 - protein, 11 aa, ARTIFICIAL SEQUENCE
  Exemplary CDRL Sequences - CDRL3
QSYDSSLSGSV

SEQ ID NO: 876 - protein, 14 aa, ARTIFICIAL SEQUENCE
  Exemplary CDRL Sequences - CDRL1
TGSSSNIGAGYDVH

SEQ ID NO: 877 - protein, 7 aa, ARTIFICIAL SEQUENCE
  Exemplary CDRL Sequences - CDRL2
GNSNRPS

SEQ ID NO: 878 - protein, 11 aa, ARTIFICIAL SEQUENCE
  Exemplary CDRL Sequences - CDRL3
QSYDSSLSGSV

SEQ ID NO: 879 - protein, 16 aa, ARTIFICIAL SEQUENCE
  Exemplary CDRL Sequences - CDRL1
RSSQSLLHSNGHNYLD

SEQ ID NO: 880 - protein, 7 aa, ARTIFICIAL SEQUENCE
  Exemplary CDRL Sequences - CDRL2
LGLNRAS

SEQ ID NO: 881 - protein, 9 aa, ARTIFICIAL SEQUENCE
  Exemplary CDRL Sequences - CDRL3
MQALQTPLT

SEQ ID NO: 882 - protein, 16 aa, ARTIFICIAL SEQUENCE
  Exemplary CDRL Sequences - CDRL1
RSSQSLLHSNGHNYLD

SEQ ID NO: 883 - protein, 7 aa, ARTIFICIAL SEQUENCE
  Exemplary CDRL Sequences - CDRL2
LGLNRAH

SEQ ID NO: 884 - protein, 9 aa, ARTIFICIAL SEQUENCE
  Exemplary CDRL Sequences - CDRL3
MQALQTPLT

SEQ ID NO: 885 - protein, 16 aa, ARTIFICIAL SEQUENCE
  Exemplary CDRL Sequences - CDRL1
RSSQSLLHSNGHNYLD

SEQ ID NO: 886 - protein, 7 aa, ARTIFICIAL SEQUENCE
  Exemplary CDRL Sequences - CDRL2
LGLNRAS

SEQ ID NO: 887 - protein, 9 aa, ARTIFICIAL SEQUENCE
  Exemplary CDRL Sequences - CDRL3
MQALQTPLT

SEQ ID NO: 888 - protein, 16 aa, ARTIFICIAL SEQUENCE
  Exemplary CDRL Sequences - CDRL1
RSSQSLLHSYGYNYLD

SEQ ID NO: 889 - protein, 7 aa, ARTIFICIAL SEQUENCE
  Exemplary CDRL Sequences - CDRL2
LGSNRAS

SEQ ID NO: 890 - protein, 9 aa, ARTIFICIAL SEQUENCE
  Exemplary CDRL Sequences - CDRL3
MQALQTPLT

SEQ ID NO: 891 - protein, 16 aa, ARTIFICIAL SEQUENCE
  Exemplary CDRL Sequences - CDRL1
RSSQSLLHSFGYNYLD

SEQ ID NO: 892 - protein, 7 aa, ARTIFICIAL SEQUENCE
  Exemplary CDRL Sequences - CDRL2
LGSNRAS

SEQ ID NO: 893 - protein, 9 aa, ARTIFICIAL SEQUENCE
  Exemplary CDRL Sequences - CDRL3
MQALQTPLT

SEQ ID NO: 894 - protein, 16 aa, ARTIFICIAL SEQUENCE
  Exemplary CDRL Sequences - CDRL1
RSSQSLLHSNGYNYLD

SEQ ID NO: 895 - protein, 7 aa, ARTIFICIAL SEQUENCE
  Exemplary CDRL Sequences - CDRL2
LGLNRAS

SEQ ID NO: 896 - protein, 9 aa, ARTIFICIAL SEQUENCE
  Exemplary CDRL Sequences - CDRL3
MQALQTPLT

SEQ ID NO: 897 - protein, 16 aa, ARTIFICIAL SEQUENCE
  Exemplary CDRL Sequences - CDRL1
RSSQSLLHSFGYNYLD

SEQ ID NO: 898 - protein, 7 aa, ARTIFICIAL SEQUENCE
  Exemplary CDRL Sequences - CDRL2
LGLNRAS

SEQ ID NO: 899 - protein, 9 aa, ARTIFICIAL SEQUENCE
  Exemplary CDRL Sequences - CDRL3
MQALQTPLT

SEQ ID NO: 900 - protein, 16 aa, ARTIFICIAL SEQUENCE
  Exemplary CDRL Sequences - CDRL1
RSSQSLLHSFGYNYLD

SEQ ID NO: 901 - protein, 7 aa, ARTIFICIAL SEQUENCE
  Exemplary CDRL Sequences - CDRL2
LGMNRAS

SEQ ID NO: 902 - protein, 9 aa, ARTIFICIAL SEQUENCE
  Exemplary CDRL Sequences - CDRL3
MQALQTPLT

SEQ ID NO: 903 - protein, 16 aa, ARTIFICIAL SEQUENCE
  Exemplary CDRL Sequences - CDRL1
RSSQSLLHSFGYNYLD

SEQ ID NO: 904 - protein, 7 aa, ARTIFICIAL SEQUENCE
  Exemplary CDRL Sequences - CDRL2
LGMNRAS

SEQ ID NO: 905 - protein, 9 aa, ARTIFICIAL SEQUENCE
  Exemplary CDRL Sequences - CDRL3
MQALQTPLT

SEQ ID NO: 906 - protein, 16 aa, ARTIFICIAL SEQUENCE
  Exemplary CDRL Sequences - CDRL1
RSSQSLLHSFGYNYLD

SEQ ID NO: 907 - protein, 7 aa, ARTIFICIAL SEQUENCE
  Exemplary CDRL Sequences - CDRL2
LGHNRAS

SEQ ID NO: 908 - protein, 9 aa, ARTIFICIAL SEQUENCE
  Exemplary CDRL Sequences - CDRL3
MQALQTPLT

SEQ ID NO: 909 - protein, 16 aa, ARTIFICIAL SEQUENCE
  Exemplary CDRL Sequences - CDRL1
RSSQSLLHSFGYNYLD

SEQ ID NO: 910 - protein, 7 aa, ARTIFICIAL SEQUENCE
  Exemplary CDRL Sequences - CDRL2
LGNNRAS

SEQ ID NO: 911 - protein, 9 aa, ARTIFICIAL SEQUENCE
  Exemplary CDRL Sequences - CDRL3
MQALQTPLT

SEQ ID NO: 912 - protein, 16 aa, ARTIFICIAL SEQUENCE
  Exemplary CDRL Sequences - CDRL1
RSSQSLLHSFGYNYLD

SEQ ID NO: 913 - protein, 7 aa, ARTIFICIAL SEQUENCE
  Exemplary CDRL Sequences - CDRL2
LGWNRAS

SEQ ID NO: 914 - protein, 9 aa, ARTIFICIAL SEQUENCE
  Exemplary CDRL Sequences - CDRL3
MQALQTPLT

SEQ ID NO: 915 - protein, 16 aa, ARTIFICIAL SEQUENCE
  Exemplary CDRL Sequences - CDRL1
RSSQSLLHSFGYNYLD

SEQ ID NO: 916 - protein, 7 aa, ARTIFICIAL SEQUENCE
  Exemplary CDRL Sequences - CDRL2
LGQNRAS

SEQ ID NO: 917 - protein, 9 aa, ARTIFICIAL SEQUENCE
  Exemplary CDRL Sequences - CDRL3
MQALQTPLT

SEQ ID NO: 918 - protein, 17 aa, ARTIFICIAL SEQUENCE
  Exemplary CDRL Sequences - CDRL1
RSSQSLLHSGNGYNYLD

SEQ ID NO: 919 - protein, 7 aa, ARTIFICIAL SEQUENCE
  Exemplary CDRL Sequences - CDRL2
LGLNRAS

SEQ ID NO: 920 - protein, 9 aa, ARTIFICIAL SEQUENCE
  Exemplary CDRL Sequences - CDRL3
MQAIHTPLT

SEQ ID NO: 921 - protein, 17 aa, ARTIFICIAL SEQUENCE
  Exemplary CDRL Sequences - CDRL1
RSSQSLLHSGNGYNYLD

SEQ ID NO: 922 - protein, 7 aa, ARTIFICIAL SEQUENCE
  Exemplary CDRL Sequences - CDRL2
LGMNRAS

SEQ ID NO: 923 - protein, 9 aa, ARTIFICIAL SEQUENCE
  Exemplary CDRL Sequences - CDRL3
MQAIHTPLT

SEQ ID NO: 924 - protein, 17 aa, ARTIFICIAL SEQUENCE
  Exemplary CDRL Sequences - CDRL1
RSSQSLLHSGNGYNYLD

SEQ ID NO: 925 - protein, 7 aa, ARTIFICIAL SEQUENCE
  Exemplary CDRL Sequences - CDRL2
LGFNRAS

SEQ ID NO: 926 - protein, 9 aa, ARTIFICIAL SEQUENCE
  Exemplary CDRL Sequences - CDRL3
MQAIHTPLT

SEQ ID NO: 927 - protein, 17 aa, ARTIFICIAL SEQUENCE
  Exemplary CDRL Sequences - CDRL1
RSSQSLLHSGNGYNYLD

SEQ ID NO: 928 - protein, 7 aa, ARTIFICIAL SEQUENCE
  Exemplary CDRL Sequences - CDRL2
LGHNRAS

SEQ ID NO: 929 - protein, 9 aa, ARTIFICIAL SEQUENCE
  Exemplary CDRL Sequences - CDRL3
MQAIHTPLT

SEQ ID NO: 930 - protein, 17 aa, ARTIFICIAL SEQUENCE
  Exemplary CDRL Sequences - CDRL1
RSSQSLLHSGNGYNYLD

SEQ ID NO: 931 - protein, 7 aa, ARTIFICIAL SEQUENCE
  Exemplary CDRL Sequences - CDRL2
LGNNRAS

SEQ ID NO: 932 - protein, 9 aa, ARTIFICIAL SEQUENCE
  Exemplary CDRL Sequences - CDRL3
MQAIHTPLT

SEQ ID NO: 933 - protein, 17 aa, ARTIFICIAL SEQUENCE
  Exemplary CDRL Sequences - CDRL1
RSSQSLLHSGNGYNYLD

SEQ ID NO: 934 - protein, 7 aa, ARTIFICIAL SEQUENCE
  Exemplary CDRL Sequences - CDRL2
LGWNRAS

SEQ ID NO: 935 - protein, 9 aa, ARTIFICIAL SEQUENCE
  Exemplary CDRL Sequences - CDRL3
MQAIHTPLT

SEQ ID NO: 936 - protein, 17 aa, ARTIFICIAL SEQUENCE
  Exemplary CDRL Sequences - CDRL1
RSSQSLLHSGNGYNYLD

SEQ ID NO: 937 - protein, 7 aa, ARTIFICIAL SEQUENCE
  Exemplary CDRL Sequences - CDRL2
LGQNRAS

SEQ ID NO: 938 - protein, 9 aa, ARTIFICIAL SEQUENCE
  Exemplary CDRL Sequences - CDRL3
MQAIHTPLT

SEQ ID NO: 939 - protein, 16 aa, ARTIFICIAL SEQUENCE
  Exemplary CDRL Sequences - CDRL1
RSSQSLLHSNGYNYLD

SEQ ID NO: 940 - protein, 7 aa, ARTIFICIAL SEQUENCE
  Exemplary CDRL Sequences - CDRL2
LGLARAS

SEQ ID NO: 941 - protein, 9 aa, ARTIFICIAL SEQUENCE
  Exemplary CDRL Sequences - CDRL3
MQALQTPLT

SEQ ID NO: 942 - protein, 16 aa, ARTIFICIAL SEQUENCE
  Exemplary CDRL Sequences - CDRL1
RSSQSLLHSNGYNYLD

SEQ ID NO: 943 - protein, 7 aa, ARTIFICIAL SEQUENCE
  Exemplary CDRL Sequences - CDRL2
LGLARAS

SEQ ID NO: 944 - protein, 9 aa, ARTIFICIAL SEQUENCE
  Exemplary CDRL Sequences - CDRL3
MQALQTPLT

SEQ ID NO: 945 - protein, 17 aa, ARTIFICIAL SEQUENCE
  Exemplary CDRL Sequences - CDRL1
RSSQSLLHSGNGYNYLD

SEQ ID NO: 946 - protein, 7 aa, ARTIFICIAL SEQUENCE
  Exemplary CDRL Sequences - CDRL2
LGLNRAS

SEQ ID NO: 947 - protein, 9 aa, ARTIFICIAL SEQUENCE
  Exemplary CDRL Sequences - CDRL3
MQAIHTPLT

SEQ ID NO: 948 - protein, 16 aa, ARTIFICIAL SEQUENCE
  Exemplary CDRL Sequences - CDRL1
RSSQSLLHSNGHNYLD

SEQ ID NO: 949 - protein, 7 aa, ARTIFICIAL SEQUENCE
  Exemplary CDRL Sequences - CDRL2
LGLNRAS

SEQ ID NO: 950 - protein, 9 aa, ARTIFICIAL SEQUENCE
  Exemplary CDRL Sequences - CDRL3
MQALQTPLT

SEQ ID NO: 951 - protein, 16 aa, ARTIFICIAL SEQUENCE
  Exemplary CDRL Sequences - CDRL1
RSSQSLLHSNGHNYLD

SEQ ID NO: 952 - protein, 7 aa, ARTIFICIAL SEQUENCE
  Exemplary CDRL Sequences - CDRL2
LGLNRAS

SEQ ID NO: 953 - protein, 9 aa, ARTIFICIAL SEQUENCE
  Exemplary CDRL Sequences - CDRL3
MQALQTPLT

SEQ ID NO: 954 - protein, 17 aa, ARTIFICIAL SEQUENCE
  Exemplary CDRL Sequences - CDRL1
RSSQSLLHSGNGYNYLD

SEQ ID NO: 955 - protein, 7 aa, ARTIFICIAL SEQUENCE
  Exemplary CDRL Sequences - CDRL2
LGLNRAS

SEQ ID NO: 956 - protein, 9 aa, ARTIFICIAL SEQUENCE
  Exemplary CDRL Sequences - CDRL3
MQAIHTPLT

SEQ ID NO: 957 - protein, 17 aa, ARTIFICIAL SEQUENCE
  Exemplary CDRL Sequences - CDRL1
RSSQSLLHSGNGYNYLD

SEQ ID NO: 958 - protein, 7 aa, ARTIFICIAL SEQUENCE
  Exemplary CDRL Sequences - CDRL2
LGLNRAS

SEQ ID NO: 959 - protein, 9 aa, ARTIFICIAL SEQUENCE
  Exemplary CDRL Sequences - CDRL3
MQALQTPLT

SEQ ID NO: 960 - protein, 16 aa, ARTIFICIAL SEQUENCE
  Exemplary CDRL Sequences - CDRL1
RSSQSLLHSNGHNYLD

SEQ ID NO: 961 - protein, 7 aa, ARTIFICIAL SEQUENCE
  Exemplary CDRL Sequences - CDRL2
LGLNRAH

SEQ ID NO: 962 - protein, 9 aa, ARTIFICIAL SEQUENCE
  Exemplary CDRL Sequences - CDRL3
MQALQTPLT

SEQ ID NO: 963 - protein, 16 aa, ARTIFICIAL SEQUENCE
  Exemplary CDRL Sequences - CDRL1
RSSQSLLHSNGYNYLD

SEQ ID NO: 964 - protein, 7 aa, ARTIFICIAL SEQUENCE
  Exemplary CDRL Sequences - CDRL2
LGLNRAS

SEQ ID NO: 965 - protein, 9 aa, ARTIFICIAL SEQUENCE
  Exemplary CDRL Sequences - CDRL3
MQALQTPLT

SEQ ID NO: 966 - protein, 16 aa, ARTIFICIAL SEQUENCE
  Exemplary CDRL Sequences - CDRL1
RSSQSLLHSFGYNYLD

SEQ ID NO: 967 - protein, 7 aa, ARTIFICIAL SEQUENCE
  Exemplary CDRL Sequences - CDRL2
LGLNRAS

SEQ ID NO: 968 - protein, 9 aa, ARTIFICIAL SEQUENCE
  Exemplary CDRL Sequences - CDRL3
MQALQTPLT

SEQ ID NO: 969 - protein, 16 aa, ARTIFICIAL SEQUENCE
  Exemplary CDRL Sequences - CDRL1
RSSQSLLHSFGHNYLD

SEQ ID NO: 970 - protein, 7 aa, ARTIFICIAL SEQUENCE
  Exemplary CDRL Sequences - CDRL2
LGLNRAH

SEQ ID NO: 971 - protein, 9 aa, ARTIFICIAL SEQUENCE
  Exemplary CDRL Sequences - CDRL3
MQALQTPLT

SEQ ID NO: 972 - protein, 16 aa, ARTIFICIAL SEQUENCE
  Exemplary CDRL Sequences - CDRL1
RSSQSLLHSFGHNYLD

SEQ ID NO: 973 - protein, 7 aa, ARTIFICIAL SEQUENCE
  Exemplary CDRL Sequences - CDRL2
LGLNRAH

SEQ ID NO: 974 - protein, 9 aa, ARTIFICIAL SEQUENCE
  Exemplary CDRL Sequences - CDRL3
MQALQTPLT

SEQ ID NO: 975 - protein, 17 aa, ARTIFICIAL SEQUENCE
  Exemplary CDRL Sequences - CDRL1
RSSQSLLHSGNGYNYLD

SEQ ID NO: 976 - protein, 7 aa, ARTIFICIAL SEQUENCE
  Exemplary CDRL Sequences - CDRL2
LGLNRAS

SEQ ID NO: 977 - protein, 9 aa, ARTIFICIAL SEQUENCE
  Exemplary CDRL Sequences - CDRL3
MQAIHTPLT

SEQ ID NO: 978 - protein, 16 aa, ARTIFICIAL SEQUENCE
  Exemplary CDRL Sequences - CDRL1
RSSQSLLHSFGYNYLD

SEQ ID NO: 979 - protein, 7 aa, ARTIFICIAL SEQUENCE
  Exemplary CDRL Sequences - CDRL2
LGLNRAS

SEQ ID NO: 980 - protein, 9 aa, ARTIFICIAL SEQUENCE
  Exemplary CDRL Sequences - CDRL3
MQALQTPLT

SEQ ID NO: 981 - protein, 16 aa, ARTIFICIAL SEQUENCE
  Exemplary CDRL Sequences - CDRL1
RSSQSLLHSNGHNYLD

SEQ ID NO: 982 - protein, 7 aa, ARTIFICIAL SEQUENCE
  Exemplary CDRL Sequences - CDRL2
LGLNRAH

SEQ ID NO: 983 - protein, 9 aa, ARTIFICIAL SEQUENCE
  Exemplary CDRL Sequences - CDRL3
MQALQTPLT

SEQ ID NO: 984 - protein, 16 aa, ARTIFICIAL SEQUENCE
  Exemplary CDRL Sequences - CDRL1
RSSQSLLHSNGHNYLD

SEQ ID NO: 985 - protein, 7 aa, ARTIFICIAL SEQUENCE
  Exemplary CDRL Sequences - CDRL2
LGLNRAH

SEQ ID NO: 986 - protein, 9 aa, ARTIFICIAL SEQUENCE
  Exemplary CDRL Sequences - CDRL3
MQALQTPLT

SEQ ID NO: 987 - protein, 16 aa, ARTIFICIAL SEQUENCE
  Exemplary CDRL Sequences - CDRL1
RSSQSLLHSNGYNYLD

SEQ ID NO: 988 - protein, 7 aa, ARTIFICIAL SEQUENCE
  Exemplary CDRL Sequences - CDRL2
LGLNRAS

SEQ ID NO: 989 - protein, 9 aa, ARTIFICIAL SEQUENCE
  Exemplary CDRL Sequences - CDRL3
MQALQTPLT

SEQ ID NO: 990 - protein, 16 aa, ARTIFICIAL SEQUENCE
  Exemplary CDRL Sequences - CDRL1
RSSQSLLHSNGYNYLD

SEQ ID NO: 991 - protein, 7 aa, ARTIFICIAL SEQUENCE
  Exemplary CDRL Sequences - CDRL2
LGLNRAS

SEQ ID NO: 992 - protein, 9 aa, ARTIFICIAL SEQUENCE
  Exemplary CDRL Sequences - CDRL3
MQALQTPLT

SEQ ID NO: 993 - protein, 16 aa, ARTIFICIAL SEQUENCE
  Exemplary CDRL Sequences - CDRL1
RSSQSLLHSFGHNYLD

SEQ ID NO: 994 - protein, 7 aa, ARTIFICIAL SEQUENCE
  Exemplary CDRL Sequences - CDRL2
LGLNRAH

SEQ ID NO: 995 - protein, 9 aa, ARTIFICIAL SEQUENCE
  Exemplary CDRL Sequences - CDRL3
MQALQTPLT

SEQ ID NO: 996 - protein, 16 aa, ARTIFICIAL SEQUENCE
  Exemplary CDRL Sequences - CDRL1
RSSQSLLHSYGHNYLD

SEQ ID NO: 997 - protein, 7 aa, ARTIFICIAL SEQUENCE
  Exemplary CDRL Sequences - CDRL2
LGLNRAH

SEQ ID NO: 998 - protein, 9 aa, ARTIFICIAL SEQUENCE
  Exemplary CDRL Sequences - CDRL3
MQALQTPLT

SEQ ID NO: 999 - protein, 16 aa, ARTIFICIAL SEQUENCE
  Exemplary CDRL Sequences - CDRL1
RSSQSLLHSYGHNYLD

SEQ ID NO: 1000 - protein, 7 aa, ARTIFICIAL SEQUENCE
  Exemplary CDRL Sequences - CDRL2
LGLNRAH

SEQ ID NO: 1001 - protein, 9 aa, ARTIFICIAL SEQUENCE
  Exemplary CDRL Sequences - CDRL3
MQALQTPLT

SEQ ID NO: 1002 - protein, 13 aa, ARTIFICIAL SEQUENCE
  Exemplary CDRL Sequences - CDRL1
SGSSSNIGNNFVS

SEQ ID NO: 1003 - protein, 7 aa, ARTIFICIAL SEQUENCE
  Exemplary CDRL Sequences - CDRL2
DYNKRPS

SEQ ID NO: 1004 - protein, 11 aa, ARTIFICIAL SEQUENCE
  Exemplary CDRL Sequences - CDRL3
GTWDSSLSAYV

SEQ ID NO: 1005 - protein, 11 aa, ARTIFICIAL SEQUENCE
  Exemplary CDRL Sequences - CDRL1
RASQSISIYLN

SEQ ID NO: 1006 - protein, 7 aa, ARTIFICIAL SEQUENCE
  Exemplary CDRL Sequences - CDRL2
AAASLQS

SEQ ID NO: 1007 - protein, 9 aa, ARTIFICIAL SEQUENCE
  Exemplary CDRL Sequences - CDRL3
QQSYSAPIT

SEQ ID NO: 1008 - protein, 16 aa, ARTIFICIAL SEQUENCE
  Exemplary CDRL Sequences - CDRL1
RSSQSLLHSNGYNYLD

SEQ ID NO: 1009 - protein, 7 aa, ARTIFICIAL SEQUENCE
  Exemplary CDRL Sequences - CDRL2
LGSNRAS

SEQ ID NO: 1010 - protein, 9 aa, ARTIFICIAL SEQUENCE
  Exemplary CDRL Sequences - CDRL3
MQAMQTPLT

SEQ ID NO: 1011 - protein, 16 aa, ARTIFICIAL SEQUENCE
  Exemplary CDRL Sequences - CDRL1
RSSQSLLHSNGYNYLD

SEQ ID NO: 1012 - protein, 7 aa, ARTIFICIAL SEQUENCE
  Exemplary CDRL Sequences - CDRL2
LGSNRAS

SEQ ID NO: 1013 - protein, 9 aa, ARTIFICIAL SEQUENCE
  Exemplary CDRL Sequences - CDRL3
MQALQTPLT

SEQ ID NO: 1014 - protein, 16 aa, ARTIFICIAL SEQUENCE
  Exemplary CDRL Sequences - CDRL1
RSSQSLLHSNMYNYLD

SEQ ID NO: 1015 - protein, 7 aa, ARTIFICIAL SEQUENCE
  Exemplary CDRL Sequences - CDRL2
LGSNRAS

SEQ ID NO: 1016 - protein, 9 aa, ARTIFICIAL SEQUENCE
  Exemplary CDRL Sequences - CDRL3
MQALQTPLT

SEQ ID NO: 1017 - protein, 16 aa, ARTIFICIAL SEQUENCE
  Exemplary CDRL Sequences - CDRL1
RSSQSLLHSNQYNYLD

SEQ ID NO: 1018 - protein, 7 aa, ARTIFICIAL SEQUENCE
  Exemplary CDRL Sequences - CDRL2
LGSNRAS

SEQ ID NO: 1019 - protein, 9 aa, ARTIFICIAL SEQUENCE
  Exemplary CDRL Sequences - CDRL3
MQALQTPLT

SEQ ID NO: 1020 - protein, 16 aa, ARTIFICIAL SEQUENCE
  Exemplary CDRL Sequences - CDRL1
RSSQSLMHSNGYNYLD

SEQ ID NO: 1021 - protein, 7 aa, ARTIFICIAL SEQUENCE
  Exemplary CDRL Sequences - CDRL2
LGSNRAS

SEQ ID NO: 1022 - protein, 9 aa, ARTIFICIAL SEQUENCE
  Exemplary CDRL Sequences - CDRL3
MQALQTPLT

SEQ ID NO: 1023 - protein, 16 aa, ARTIFICIAL SEQUENCE
  Exemplary CDRL Sequences - CDRL1
RSSQSLLHSNGYNYLD

SEQ ID NO: 1024 - protein, 7 aa, ARTIFICIAL SEQUENCE
  Exemplary CDRL Sequences - CDRL2
LGINRAS

SEQ ID NO: 1025 - protein, 9 aa, ARTIFICIAL SEQUENCE
  Exemplary CDRL Sequences - CDRL3
MQALQTPLT

SEQ ID NO: 1026 - protein, 449 aa, ARTIFICIAL SEQUENCE
  Heavy Chain
EVQLVESGGGLVKPGGSLRLSCAASGFTFSSYSMNWVRQAPGKGLEWVSSISSSSSYISYADSVKGRFTISRDNAKNSLYLQMNSLRAEDTAVYFCARDYDFWSAYYDAFDVWGQGTMVTVSSASTKGPSVFPLAPCSRSTSESTAALGCLVKDYFPEPVTVSWNSGALTSGVHTFPAVLQSSGLYSLSSVVTVPSSNFGTQTYTCNVDHKPSNTKVDKTVERKCCVECPPCPAPPVAGPSVFLFPPKPKDTLMISRTPEVTCVVVDVSHEDPEVQFNWYVDGVEVHNAKTKPREEQFNSTFRVVSVLTVVHQDWLNGKEYKCKVSNKGLPAPIEKTISKTKGQPREPQVYTLPPSREEMTKNQVSLTCLVKGFYPSDIAVEWESNGQPENNYKTTPPMLDSDGSFFLYSKLTVDKSRWQQGNVFSCSVMHEALHNHYTQKSLSLSPGK

SEQ ID NO: 1027 - protein, 217 aa, ARTIFICIAL SEQUENCE
  Light Chain
ESVLTQPPSVSGAPGQRVTISCTGSSSNIGAGYDVHWYQQLPGTAPKLLISGNSNRPSGVPDRFSGSKSGTSASLAITGLQAEDEADYYCQSYDSSLSGSVFGGGTKLTVLGQPKAAPSVTLFPPSSEELQANKATLVCLISDFYPGAVTVAWKADSSPVKAGVETTTPSKQSNNKYAASSYLSLTPEQWKSHRSYSCQVTHEGSTVEKTVAPTECS

SEQ ID NO: 1028 - protein, 449 aa, ARTIFICIAL SEQUENCE
  Heavy Chain
EVQLVESGGGLVKPGGSLRLSCAASGFTFSSYSMNWVRQAPGKGLEWVSSISSSSSYISYADSVKGRFTISRDNAKNSLYLQMNSLRAEDTAVYFCARDYDFHSAYYDAFDVWGQGTMVTVSSASTKGPSVFPLAPCSRSTSESTAALGCLVKDYFPEPVTVSWNSGALTSGVHTFPAVLQSSGLYSLSSVVTVPSSNFGTQTYTCNVDHKPSNTKVDKTVERKCCVECPPCPAPPVAGPSVFLFPPKPKDTLMISRTPEVTCVVVDVSHEDPEVQFNWYVDGVEVHNAKTKPREEQFNSTFRVVSVLTVVHQDWLNGKEYKCKVSNKGLPAPIEKTISKTKGQPREPQVYTLPPSREEMTKNQVSLTCLVKGFYPSDIAVEWESNGQPENNYKTTPPMLDSDGSFFLYSKLTVDKSRWQQGNVFSCSVMHEALHNHYTQKSLSLSPGK

SEQ ID NO: 1029 - protein, 217 aa, ARTIFICIAL SEQUENCE; identical to SEQ ID NO: 1027
  Light Chain

1. An isolated antigen binding protein that binds to human PSCk9 at pH 5.5 with an affinity of 1 nM to about 100 nM and at pH7.4 with an affinity of 0.01 nM to about 10 nM.

2. The antigen binding protein of claim 1, comprising a half life of 168 hours to about 1008 hours.

3. The antigen binding protein of claim 1, comprising a complex dissociation rate at pH 5.5 in which T½ at pH 5.5 could be 1 second to about 100 seconds.

4. The antigen binding protein of claim 1, wherein the antigen binding protein comprises one or more of:
(a) a light chain comprising an amino acid sequence according to one of SEQ ID NOs 8-91;
(b) a heavy chain comprising an amino acid sequence according to one of SEQ ID NOs 92-175; or
(c) a combination comprising a light chain of (a) and a heavy chain of (b).

5. The antigen binding protein of claim 1, wherein the antigen binding protein comprises one or more of:
(a) a heavy chain variable domain comprising an amino acid sequence according to one of SEQ ID NOs 270-353;
(b) a light chain variable domain comprising an amino acid sequence according to one of SEQ ID NOs 186-269; or
(c) a combination comprising a heavy chain variable domain of (a) and a light chain variable domain of (b).

6. The antigen binding protein of claim 1, wherein the antigen binding protein comprises one or more of:
(a) a heavy chain and light chain comprised in an antibody selected from any one of the antibodies in (d) and comprising an amino acid sequence according comprised in any one of the antibodies;
(b) a heavy and light chain variable domain comprised in an antibody selected from any one of the antibodies in (d); or
(c) a CDRH1, CDRH2, and CDRH3 and a CDRL1, CDRL2 and CDRL3 comprised in any one of the antibodies listed in (d);
(d) SS-13406 (8A3HLE-51), SS-13407 (8A3HLE-112), SS-14888 (P2C6-HLE51), 13G9, 19A12, 20D12, 25B5, 30G7, SS-15057, SS-15058, SS-15059, SS-15065, SS-15079, SS-15080, SS-15087, SS-15101, SS-15103, SS-15104, SS-15105, SS-15106, SS-15108, SS-15112, SS-15113, SS-15114, SS-15117, SS-15121, SS-15123, SS-15124, SS-15126, SS-15132, SS-15133, SS-15136, SS-15139, SS-15140, SS-15141, SS-13983 (A01), SS-13991 (A02), SS-13993 (C02), SS-12685 (P1B1), SS-12686 (P2F5), SS-12687 (P2C6), SS-14892 (P2F5/P2C6), SS-15509, SS-15510, SS-15511, SS-15512, SS-15513, SS-15514, SS-15497, SS-15515, SS-15516, SS-15517, SS-15518, SS-15519, SS-15520, SS-15522, SS-15524, SS-14835, SS-15194, SS-15195, SS-15196, SS-14894, SS-15504, SS-15494, SS-14892, SS-15495, SS-15496, SS-15497, SS-15503, SS-15505, SS-15506, SS-15507, SS-15502, SS-15508, SS-1550, SS-15500, SS-15003, SS-15005, SS-15757 (P1F4), SS-15758 (P1B6), SS-15759 (P2F4), SS-15761 (P2G5), SS-15763 (P2H7) and SS-15764 (P2H8).

7. The anti-PCSK9 antigen binding protein of claim 1, wherein the antigen binding protein is a monoclonal antibody.

8. The anti-PCSK9 of claim 7, wherein the antibody is humanized.

9. The anti-PCSK9 antibody of claim 7, wherein the antibody is human.

10. The anti-PCSK9 antibody of claim 7, wherein the antibody is an antibody fragment selected from a Fab, Fab′-SH, Fv, scFv or (Fab′).sub.2 fragment.

11. The anti-PCSK9 antibody of claim 7, wherein at least a portion of the framework sequence is a human consensus framework sequence.

12. A pharmaceutical composition comprising one or more antigen binding proteins of claim 1 in admixture with a pharmaceutically acceptable carrier thereof.

13. An isolated nucleic acid comprising a polynucleotide sequence encoding the light chain variable domain amino acid sequence, the heavy chain variable domain amino acid sequence, or both amino acid sequences, of an antigen binding protein of claim 1.

14. An expression vector comprising the nucleic acid of claim 13.

15. An isolated host cell comprising the nucleic acid of claim 13.

16. An isolated host cell comprising the expression vector of claim 14.

17. A method of producing an antigen binding protein comprising incubating the host cell of claim 15 or 16 under conditions that allow it to express the antigen binding protein.

18. A method of preventing or treating a condition in a subject in need of such treatment comprising administering a therapeutically effective amount of the composition of claim 12 to the subject, wherein the condition is treatable by lowering serum LDL cholesterol levels.

19. The method of claim 18, wherein the condition is hypercholesterolemia.
